(19) United States
(12) Patent Application Publication
(10) Pub. No.: US 2026/0078375 A1
(43) Pub. Date: Mar. 19, 2026

(54) RNAi Agents for Inhibiting Influenza A Viral Gene Expression, Compositions Thereof, and Methods of Use

(71) Applicant: Arrowhead Pharmaceuticals, Inc., Pasadena, CA (US)

(72) Inventors: Erik W. Bush, Verona, WI (US); Keivan Zandi, San Diego, CA (US); Zhao Xu, San Diego, CA (US); Tingting Yuan, Madison, WI (US); Alireza Saeidi, San Diego, CA (US); Casi Schienebeck, Deerfield, WI (US); Anthony Nicholas, Oregon, WI (US); Tao Pei, Middleton, WI (US)

(21) Appl. No.: 19/266,598

(22) Filed: Jul. 11, 2025

Related U.S. Application Data
(63) Continuation of application No. PCT/US2024/011462, filed on Jan. 12, 2024.
(60) Provisional application No. 63/479,859, filed on Jan. 13, 2023.
(60) Provisional application No. 63/488,062, filed on Mar. 2, 2023.
(60) Provisional application No. 63/499,065, filed on Apr. 28, 2023.
(60) Provisional application No. 63/596,336, filed on Nov. 6, 2023.

(51) Int. Cl. C12N 15/113; A61P 31/16

(52) U.S. Cl. CPC C12N 15/1131; A61P 31/16; C12N 2310/14; C12N 2310/313; C12N 2310/314; C12N 2310/321; C12N 2310/351

(57) ABSTRACT

Described are RNAi agents, compositions that include RNAi agents, and methods for inhibition of an influenza A viral genome. The influenza A viral (IAV) RNAi agents and RNAi agent conjugates disclosed herein inhibit the expression of an influenza A viral genome at targeted portions of the genome that are conserved across a variety of known influenza A viral genome variants, and are therefore capable of inhibiting expression of various influenza A virus strains. Pharmaceutical compositions that include one or more IAV RNAi agents, optionally with one or more additional therapeutics, are also described. Delivery of the described IAV RNAi agents to pulmonary cells, in vivo, provides for inhibition of influenza A viral genome expression, which can provide a therapeutic benefit to subjects, including human subjects, for the treatment of various diseases, disorders, and/or symptoms caused by influenza A viral infection.

### RELATED APPLICATIONS

[0001] This application is a continuation application of International Application No. PCT/US2024/011462, filed on Jan. 12, 2024, which claims the benefit of priority of U.S. Provisional Patent Applications Ser. No. 63/479,859, filed on Jan. 13, 2023, United States Provisional Patent Applications Serial No. 63,488,062, filed Mar. 2, 2023, U.S. Provisional Patent Applications Ser. No. 63/499,065, filed Apr. 28, 2023, and U.S. Provisional Patent Applications Ser. No. 63/596,336, filed Nov. 6, 2023, the contents of each of which are incorporated herein by reference in their entirety.

### FIELD OF THE INVENTION

[0002] The present disclosure relates to RNA interference (RNAi) agents, e.g., double stranded RNAi agents such as small interfering RNA (siRNA), for inhibition of influenza A (IAV) viral genome (or gene) expression, including compositions that include IAV RNAi agents, and methods of use thereof.

### SEQUENCE LISTING

[0003] This application contains a Sequence Listing which has been submitted in XML format and is hereby incorporated by reference in its entirety. The XML copy is named 30715-US1_SeqListing.xml, created Jul. 11, 2025, and is 6,282,366 bytes in size.

### BACKGROUND

[0004] Influenza, more commonly referred to as “Flu,” is a contagious respiratory illness caused by influenza viruses that infect the nose, throat, and sometimes the lungs. It can cause a broad spectrum of relatively mild to quite severe illness, and in some instances can lead to death. A 2018 study from the Centers for Disease Control and Prevention (CDC) concluded that on average, about 8 percent of the U.S. population gets sick from flu each season, with a range of between 3 percent and 11 percent, depending on the season.

[0005] Influenza virus is a member of the Orthomyxoviridae family and comes in four types: A, B, C and D. (Li, X., Gu, M., Zheng, Q. et al. Packaging signal of influenza A virus. Virol J 18, 36 (2021)). The influenza virus particle is composed of a viral envelope, matrix proteins and viral ribonucleocapsids (vRNPs). Influenza A and B virus genomes each comprise eight negative-sense, single-stranded viral RNA (vRNA) segments, which are: M1/M2, NS1, NA, NP, HA, PA, PB1, and PB2. (Bouvier N M, Palese P. The biology of influenza viruses. Vaccine. 2008 Sep. 12; 26 Suppl 4(Suppl 4):D49-53). Influenza C has a seven-segment genome. These viral segments encode the various proteins necessary to facilitate the influenza viral cycle of virus entry, viral RNA synthesis, viral protein synthesis, viral RNA packaging and assembly, and virus budding and release.

[0006] Flu has been reported to cause between 290,000 and 650,000 deaths per year. (https://www.cdc.gov/media/releases/2017/p1213-flu-death-estimate.html, last visited Mar. 1, 2023). Flu creates a huge economic burden and strain on the medical systems, with estimates of over $3 billion in annual direct medical costs in the United States alone. While flu vaccines that can be administered annually are widely available and can reduce illnesses and symptoms in many individuals, they do not prevent influenza-induced mortality in high-risk populations. Further, while currently there are 4 FDA-approved antiviral compounds that are indicated to be taken within 48 hours of symptom onset, they are not recommended for flu prevention. Moreover, while these products target either the NA vRNA segment (oseltamivir (Tamiflu®), zanamivir (Relenza®), and peramivir (Rapivab®) or the PA vRNA segment (baloxavir marboxil (Xofluza®)), strains of influenza that are resistant to the approved antiviral therapies are becoming more prevalent. Thus, there is an urgent need to develop novel and effective alternative therapies for influenza.

[0007] Influenza A viruses are divided into subtypes based on two proteins on the surface of the virus: hemagglutinin (H) and neuraminidase (N). (https://www.cdc.gov/flu/about/viruses/types.htm, Centers for Disease Control and Prevention.) There are 18 different hemagglutinin subtypes and 11 different neuraminidase subtypes (H1 through H18 and N1 through N11, respectively). While more than 130 influenza A subtype combinations have been identified in nature, primarily from wild birds, there are potentially many more influenza A subtype combinations given the propensity for virus “reassortment.” Reassortment is a process by which influenza viruses swap gene segments. Reassortment can occur when two influenza viruses infect a host at the same time and swap genetic information.

[0008] Influenza A viruses circulate and cause seasonal epidemics of disease. Currently known circulating viruses in humans include subtype A H1N1, subtype A H2N2, and subtype A H3N2. (Belser J A, Maines T R, Tumpey T M, Katz J M. Influenza A virus transmission: contributing factors and clinical implications. Expert Rev. Mol. Med. 12: e39.) In recent years, an increasing number of IAV subtypes have been detected in humans, including H5N1, H7N9, and H10N8. (Rejmanek D, Hosseini P R, Mazet J A, Daszak P, Goldstein T. Evolutionary Dynamics and Global Diversity of Influenza A Virus. J Virol. 2015 November; 89(21):10993-1001. doi: 10.1128/JVI.01573-15. Epub 2015 August 26. PMID: 26311890; PMCID: PMC4621101.)

[0009] Of note, the avian H5N1 virus often leads to severe cases when infecting humans. (Wang Y, Song T, Li K, Jin Y, Yue J, Ren H, Liang L. Different Subtypes of Influenza Viruses Target Different Human Proteins and Pathways Leading to Different Pathogenic Phenotypes. Biomed Res Int. 2019 Oct. 22; 2019:4794910. doi: 10.1155/2019/4794910. PMID: 31772934; PMCID: PMC6854240.) In 1996, for example, the highly pathogenic avian influenza (HPAI) H5N1 virus was first identified in domestic waterfowl in Southern China. In 1997, H5N1 poultry outbreaks occurred in China and Hong Kong with 18 associated human cases (6 deaths) in Hong Kong. This virus outbreak caused more than 860 human infections with a greater than 50% death rate. (https://www.cdc.gov/flu/avianflu/communication-resources/bird-flu-origin-infographic.html, Center for Disease Control and Prevention.) The first case of an avian influenza A (H5N1) virus in a person in the United States was reported on Apr. 28, 2022. Though current risk of H5N1 human infection remains low, people with job-related or recreational exposures to birds or infected mammals should take appropriate precautions to protect against bird flu H5N1. Right now, the H5N1 bird flu situation remains primarily an animal health issue. However, CDC is watching this situation closely and taking routine preparedness and prevention measures in case this virus changes to pose a greater human health risk.

### SUMMARY

[0010] There exists a need for novel RNA interference (RNAi) agents (termed RNAi agents, RNAi triggers, or triggers), e.g., double-stranded RNAi agents such as small interfering RNA (siRNA), that are able to selectively and efficiently inhibit the expression of influenza A viral genomes, including but not limited to selectively and efficiently inhibiting the influenza A mRNA expression and thus the replication of influenza A viral genome. Further, there exists a need for compositions of novel influenza A-genome-specific RNAi agents for use as a therapeutic or medicament for the treatment of influenza A and/or diseases or disorders (including alleviating symptoms) that can be mediated at least in part by a reduction in influenza A viral genome expression. While the concept of targeting influenza with an RNAi agent such as an siRNA, including the advantages of using this approach, has long been proposed (see, e.g., Sailen Bank, siRNA for Influenza Therapy, Viruses (2010) 2(7): 1448-1457), more than a decade later there still is no anti-influenza A siRNA drug that has received market authorization for treatment in humans.

[0011] The nucleotide sequences and chemical modifications of the influenza A virus (IAV) RNAi agents disclosed herein, as well as their combination with certain specific targeting ligands suitable for selectively and efficiently delivering the IAV RNAi agents to pulmonary cells in vivo, including delivery by inhalation administration, differ from those previously disclosed or known in the art and overcome the challenges and obstacles that others were unable to surmount. The IAV RNAi agents disclosed herein provide for highly potent and efficient in vivo inhibition of the expression of influenza A mRNA (or transcripts), and because of the conserved nature of the RNAi agent antisense strand sequences disclosed herein, are expected to effectively inhibit a vast majority of the thousands of known and unknown variants of influenza A mRNA (or transcripts).

[0012] In general, the present disclosure features IAV RNAi agents that are specific to influenza A viral genome and target a portion of the genome that is conserved across other influenza genomes, compositions that include IAV RNAi agents, and methods for inhibiting expression of an influenza A viral genome in vivo, using the IAV RNAi agents and compositions that include IAV RNAi agents described herein. The IAV RNAi agents described herein are able to selectively and efficiently decrease expression of influenza A viral genomes. The IAV RNAi agents can be used to inhibit expression of influenza A viral genomes of influenza A subtypes including but not limited to, H1N1, H2N2, H3N2, H5N1, H7N9, and H10N8.

[0013] The described IAV RNAi agents can be used in methods for therapeutic treatment (including potentially preventative or prophylactic treatment) of symptoms or diseases related to influenza A viral infection, including but not limited to infection of the nose, throat, lungs, and other parts of the respiratory system.

[0014] The described IAV RNAi agents can be used in methods for therapeutic treatment (including potentially preventative or prophylactic treatment) of symptoms or diseases related to influenza A viral infection, of influenza A subtypes including but not limited to, H1N1, H2N2, H3N2, H5N1, H7N9, and H10N8.

[0015] As the described IAV RNAi agents are designed to inhibit expression of influenza A viral genomes by targeting highly conserved genomic regions of the influenza A viral genome, the IAV RNAi agents can inhibit expression of multiple subtypes of the influenza A virus, including but not limited to, H1N1, H2N2, H3N2, H5N1, H7N9, and H10N8.

[0016] In one aspect, the disclosure features RNAi agents for inhibiting expression of influenza A viral genomes, wherein the RNAi agent includes a sense strand (also referred to as a passenger strand) and an antisense strand (also referred to as a guide strand). The sense strand and the antisense strand can be partially, substantially, or fully complementary to each other. The length of the RNAi agent sense strands described herein each can be 15 to 49 nucleotides in length. The length of the RNAi agent antisense strands described herein each can be 18 to 49 nucleotides in length. In some embodiments, the sense and antisense strands are independently 18 to 26 nucleotides in length. The sense and antisense strands can be either the same length or different lengths. In some embodiments, the sense and antisense strands are independently 21 to 26 nucleotides in length. In some embodiments, the sense and antisense strands are independently 21 to 24 nucleotides in length. In some embodiments, both the sense strand and the antisense strand are 21 nucleotides in length. In some embodiments, the antisense strands are independently 18, 19, 20, 21, 22, 23, 24, 25, 26, 27, 28, 29, or 30 nucleotides in length. In some embodiments, the sense strands are independently 15, 16, 17, 18, 19, 20, 21, 22, 23, 24, 25, 26, 27, 28, 29, 30, 31, 32, 33, 34, 35, 36, 37, 38, 39, 40, 41, 42, 43, 44, 45, 46, 47, 48, or 49 nucleotides in length. The RNAi agents described herein, upon delivery to a cell expressing influenza A viral genomes such as a pulmonary cell, inhibit the expression of one or more influenza A viral genomes in vivo and/or in vitro through the RNA-induced silencing complex (RISC)-mediated cleavage of the viral RNA transcripts.

[0017] The IAV RNAi agents disclosed herein are designed to target influenza A viral genomes (see, e.g., SEQ ID NO:1-6) in a region that is anticipated to be conserved across a variety of different influenza viruses. In some embodiments, the IAV RNAi agents disclosed herein are designed to target a portion of an influenza A viral gene having the sequence of any of the sequences disclosed in Table 1A, Table 1B, Table 1C, Table 1D, Table 1E, or Table 1F.

[0018] In another aspect, the disclosure features compositions, including pharmaceutical compositions, that include one or more of the disclosed IAV RNAi agents that are able to selectively and efficiently decrease expression of an influenza A viral gene. The compositions that include one or more IAV RNAi agents described herein can be administered to a subject, such as a human or animal subject, for the treatment (including potential prophylactic treatment or inhibition) of symptoms and diseases associated influenza A viral infection, including but not limited to infection of the nose, throat, lungs, and other parts of the respiratory system.

[0019] Examples of IAV RNAi agent sense strands and antisense strands that can be used in an IAV RNAi agent are provided in Tables 3A, 3B, 3C, 3D, 3E, 3F, 4A, 4B, 4C, 4D, 4E, 4F, 5A, 5B, 5C, 5D, 5E, 5F, 6A, 6B, 6C, 6D, 6E, and 6F. Examples of IAV RNAi agent duplexes are provided in Tables 7A-1, 7A-2, 7A-3, 7A-4, 7A-5, 7A-6, 7B-1, 7B-2, 7B-3, 7B-4, 7B-5, 7B-6, 8A, 8B, 8C, 8D, 8E, 8F, 9A, 9B, 9C, 9D, 9E, 9F, and 10A, 10B, 10C, 10D, 10E, and 10F. Examples of 19-nucleotide core stretch sequences that may consist of or may be included in the sense strands and antisense strands of certain IAV RNAi agents disclosed herein, are provided in Table 2A, 2B, 2C, 2D, 2E, and 2F.

[0020] In another aspect, the disclosure features methods for delivering IAV RNAi agents to pulmonary epithelial cells in a subject, such as a mammal, in vivo. Also described herein are compositions for use in such methods.

[0021] In some embodiments, disclosed herein are methods for delivering IAV RNAi agents to pulmonary cells (epithelial cells (including airway epithelial cells, alveolar type I and type II pneumocytes), mesenchymal cells (including smooth muscle cells and fibroblasts), immune cells (including macrophages and mast cells) and endothelial cells) to a subject in vivo. In some embodiments, the subject is a human subject.

[0022] The methods disclosed herein include the administration of one or more IAV RNAi agents to a subject, e.g., a human or animal subject, by any suitable means known in the art. The pharmaceutical compositions disclosed herein that include one or more IAV RNAi agents can be administered in a number of ways depending upon whether local or systemic treatment is desired. Administration can be, but is not limited to, for example, intravenous, intraarterial, subcutaneous, intraperitoneal, subdermal (e.g., via an implanted device), and intraparenchymal administration. In some embodiments, the pharmaceutical compositions described herein are administered by inhalation (such as dry powder inhalation or aerosol inhalation), intranasal administration, intratracheal administration, or oropharyngeal aspiration administration.

[0023] In some embodiments, it is desired that the IAV RNAi agents described herein inhibit the expression of influenza A viral genomes in the pulmonary epithelium, for which the administration is by inhalation (e.g., by an inhaler device, such as a metered-dose inhaler, or a nebulizer such as a jet or vibrating mesh nebulizer, or a soft mist inhaler).

[0024] In some embodiments, the described IAV RNAi agents are able to selectively and efficiently inhibit expression of an influenza A viral genome. The IAV RNAi agents described herein can be used to inhibit expression of an influenza A viral genome such as, including but not limited to, H1N1, H2N2, H3N2, H5N1, H7N9, and H10N8.

[0025] The IAV RNAi agents can be delivered to target cells or tissues using any oligonucleotide delivery technology known in the art. In some embodiments, an IAV RNAi agent is delivered to cells or tissues by covalently linking the RNAi agent to a targeting group. In some embodiments, the targeting group can include a cell receptor ligand, such as an integrin targeting ligand. Integrins are a family of transmembrane receptors that facilitate cell-extracellular matrix (ECM) adhesion. In particular, integrin alpha-v-beta-6 (αvβ6) is an epithelial-specific integrin that is known to be a receptor for ECM proteins and the TGF-beta latency-associated peptide (LAP), and is expressed in various cells and tissues. Integrin αvβ6 is known to be highly upregulated in injured pulmonary epithelium. In some embodiments, the IAV RNAi agents described herein are linked to an integrin targeting ligand that has affinity for integrin αvβ6. As referred to herein, an “αvβ6 integrin targeting ligand” is a compound that has affinity for integrin αvβ6, which can be utilized as a ligand to facilitate the targeting and delivery of an RNAi agent to which it is attached to the desired cells and/or tissues (i.e., to cells expressing integrin αvβ6, such as pulmonary cells). In some embodiments, multiple αvβ6 integrin targeting ligands or clusters of αvβ6 integrin targeting ligands are linked to an IAV RNAi agent. In some embodiments, the IAV RNAi agent-αvβ6 integrin targeting ligand conjugates are selectively internalized by lung epithelial cells, either through receptor-mediated endocytosis or by other means.

[0026] Examples of targeting groups useful for delivering IAV RNAi agents that include αvβ6 integrin targeting ligands are disclosed, for example, in International Patent Application Publication No. WO 2018/085415 and International Patent Application Publication No. WO 2019/089765, each to Arrowhead Pharmaceuticals, Inc., the contents of each of which are incorporated by reference herein in their entirety.

[0027] A targeting group can be linked to the 3′ or 5′ end of a sense strand or an antisense strand of an IAV RNAi agent. In some embodiments, a targeting group is linked to the 3′ or 5′ end of the sense strand. In some embodiments, a targeting group is linked to the 5′ end of the sense strand. In some embodiments, a targeting group is linked internally to a nucleotide on the sense strand and/or the antisense strand of the RNAi agent. In some embodiments, a targeting group is linked to the RNAi agent via a linker.

[0028] In another aspect, the disclosure features compositions that include one or more IAV RNAi agents that have the duplex structures disclosed in Tables 7A-1, 7A-2, 7A-3, 7A-4, 7A-5, 7A-6, 7B-1, 7B-2, 7B-3, 7B-4, 7B-5, 7B-6, 8A, 8B, 8C, 8D, 8E, 8F, 9A, 9B, 9C, 9D, 9E, 9F, and 10A, 10B, 10C, 10D, 10E, and 10F.

[0029] The use of IAV RNAi agents provides methods for therapeutic (including prophylactic) treatment of diseases or disorders related to influenza A viral infection, including but not limited to infection of the nose, throat, lungs, and other parts of the respiratory system caused by the influenza A viral genome. The IAV RNAi agents disclosed herein can be used to treat various respiratory diseases and injury related to influenza infection. In some embodiments, the IAV RNAi agents disclosed herein can be used to treat or prevent a pulmonary inflammatory disease or condition caused by influenza infection. Use of the described IAV RNAi agents described herein can be used for therapeutic (including prophylactic) treatment of diseases or disorders related to influenza A viral infection caused by influenza A virus subtypes such as, including but not limited to, H1N1, H2N2, H3N2, H5N1, H7N9, and H10N8.

### Definitions

[0030] As used herein, the terms “oligonucleotide” and “polynucleotide” mean a polymer of linked nucleosides each of which can be independently modified or unmodified.

[0031] As used herein, an “RNAi agent” (also referred to as an “RNAi trigger”) means a chemical composition of matter that contains an RNA or RNA-like (e.g., chemically modified RNA) oligonucleotide molecule that is capable of degrading RNA or inhibiting (e.g., degrades or inhibits under appropriate conditions) translation of viral RNA (including all viral RNA and viral messenger RNA (mRNA) transcripts) of a target influenza virus in a sequence specific manner. As used herein, RNAi agents may operate through the RNA interference mechanism (i.e., inducing RNA interference through interaction with the RNA interference pathway machinery (RNA-induced silencing complex or RISC) of mammalian cells), or by any alternative mechanism(s) or pathway(s). While it is believed that RNAi agents, as that term is used herein, operate primarily through the RNA interference mechanism, the disclosed RNAi agents are not bound by or limited to any particular pathway or mechanism of action. RNAi agents disclosed herein are comprised of a sense strand and an antisense strand, and include, but are not limited to: small (or short) interfering RNAs (siRNAs), double stranded RNAs (dsRNA), micro RNAs (miRNAs), short hairpin RNAs (shRNA), and dicer substrates. The antisense strand of the RNAi agents described herein is at least partially complementary to the RNA being targeted (e.g., influenza A viral mRNA). RNAi agents can include one or more modified nucleotides and/or one or more non-phosphodiester linkages.

[0032] As used herein, the terms “silence,” “reduce,” “inhibit,” “down-regulate,” or “knockdown” when referring to expression of a given gene or a viral genome, mean that the expression of the viral gene or genome (including viral genomic RNA or subgenomic RNA), as measured by the level of RNA transcribed from the viral gene or genome, the number of viral genomes, or the level of polypeptide, protein, or protein subunit translated from the viral RNA in a cell, group of cells, tissue, organ, or subject in which the viral gene or genome is transcribed, is reduced when the cell, group of cells, tissue, organ, or subject is treated with the RNAi agents described herein as compared to a second cell, group of cells, tissue, organ, or subject that has not or have not been so treated.

[0033] As used herein, the terms “sequence” and “nucleotide sequence” mean a succession or order of nucleobases or nucleotides, described with a succession of letters using standard nomenclature.

[0034] As used herein, a “base,” “nucleotide base,” or “nucleobase,” is a heterocyclic pyrimidine or purine compound that is a component of a nucleotide, and includes the primary purine bases adenine and guanine, and the primary pyrimidine bases cytosine, thymine, and uracil. A nucleobase may further be modified to include, without limitation, universal bases, hydrophobic bases, promiscuous bases, size-expanded bases, and fluorinated bases. (See, e.g., Modified Nucleosides in Biochemistry, Biotechnology and Medicine, Herdewijn, P. ed. Wiley-VCH, 2008). The synthesis of such modified nucleobases (including phosphoramidite compounds that include modified nucleobases) is known in the art.

[0035] As used herein, and unless otherwise indicated, the term “complementary,” when used to describe a first nucleobase or nucleotide sequence (e.g., RNAi agent sense strand or targeted RNA) in relation to a second nucleobase or nucleotide sequence (e.g., RNAi agent antisense strand or a single-stranded antisense oligonucleotide), means the ability of an oligonucleotide or polynucleotide including the first nucleotide sequence to hybridize (form base pair hydrogen bonds under mammalian physiological conditions (or otherwise suitable in vivo or in vitro conditions)) and form a duplex or double helical structure under certain standard conditions with an oligonucleotide that includes the second nucleotide sequence. The person of ordinary skill in the art would be able to select the set of conditions most appropriate for a hybridization test. Complementary sequences include Watson-Crick base pairs or non-Watson-Crick base pairs and include natural or modified nucleotides or nucleotide mimics, at least to the extent that the above hybridization requirements are fulfilled. Sequence identity or complementarity is independent of modification. For example, a and Af, as defined herein, are complementary to U (or T) and identical to A for the purposes of determining identity or complementarity.

[0036] As used herein, “perfectly complementary” or “fully complementary” means that in a hybridized pair of nucleobase or nucleotide sequence molecules, all (100%) of the bases in a contiguous sequence of a first oligonucleotide will hybridize with the same number of bases in a contiguous sequence of a second oligonucleotide. The contiguous sequence may comprise all or a part of a first or second nucleotide sequence.

[0037] As used herein, “partially complementary” means that in a hybridized pair of nucleobase or nucleotide sequence molecules, at least 70%, but not all, of the bases in a contiguous sequence of a first oligonucleotide will hybridize with the same number of bases in a contiguous sequence of a second oligonucleotide. The contiguous sequence may comprise all or a part of a first or second nucleotide sequence.

[0038] As used herein, “substantially complementary” means that in a hybridized pair of nucleobase or nucleotide sequence molecules, at least 85%, but not all, of the bases in a contiguous sequence of a first oligonucleotide will hybridize with the same number of bases in a contiguous sequence of a second oligonucleotide. The contiguous sequence may comprise all or a part of a first or second nucleotide sequence.

[0039] As used herein, the terms “complementary,” “fully complementary,” “partially complementary,” and “substantially complementary” are used with respect to the nucleobase or nucleotide matching between the sense strand and the antisense strand of an RNAi agent, or between the antisense strand of an RNAi agent and a sequence of a Influenza RNA, such as a Influenza A viral genome RNA.

[0040] As used herein, the term “substantially identical” or “substantial identity,” as applied to a nucleic acid sequence means the nucleotide sequence (or a portion of a nucleotide sequence) has at least about 85% sequence identity or more, e.g., at least 90%, at least 95%, or at least 99% identity, compared to a reference sequence. Percentage of sequence identity is determined by comparing two optimally aligned sequences over a comparison window. The percentage is calculated by determining the number of positions at which the same type of nucleic acid base occurs in both sequences to yield the number of matched positions, dividing the number of matched positions by the total number of positions in the window of comparison and multiplying the result by 100 to yield the percentage of sequence identity. The inventions disclosed herein encompass nucleotide sequences substantially identical to those disclosed herein.

[0041] As used herein, the terms “treat,” “treatment,” and the like, mean the methods or steps taken to provide relief from or alleviation of the number, severity, and/or frequency of one or more symptoms of a disease in a subject. As used herein, “treat” and “treatment” may include the prevention, management, prophylactic treatment, and/or inhibition or reduction of the number, severity, and/or frequency of one or more symptoms of a disease in a subject.

[0042] As used herein, the phrase “introducing into a cell,” when referring to an RNAi agent, means functionally delivering the RNAi agent into a cell. The phrase “functional delivery,” means delivering the RNAi agent to the cell in a manner that enables the RNAi agent to have the expected biological activity, e.g., sequence-specific inhibition of gene or viral genome expression.

[0043] Unless stated otherwise, use of the symbol

[chemical structure]

as used herein means that any group or groups may be linked thereto that is in accordance with the scope of the inventions described herein.

[0044] As used herein, the term “isomers” refers to compounds that have identical molecular formulae, but that differ in the nature or the sequence of bonding of their atoms or in the arrangement of their atoms in space. Isomers that differ in the arrangement of their atoms in space are termed “stereoisomers.” Stereoisomers that are not mirror images of one another are termed “diastereoisomers,” and stereoisomers that are non-superimposable mirror images are termed “enantiomers,” or sometimes optical isomers. A carbon atom bonded to four non-identical substituents is termed a “chiral center.”

[0045] As used herein, unless specifically identified in a structure as having a particular conformation, for each structure in which asymmetric centers are present and thus give rise to enantiomers, diastereomers, or other stereoisomeric configurations, each structure disclosed herein is intended to represent all such possible isomers, including their optically pure and racemic forms. For example, the structures disclosed herein are intended to cover mixtures of diastereomers as well as single stereoisomers.

[0046] As used in a claim herein, the phrase “consisting of” excludes any element, step, or ingredient not specified in the claim. When used in a claim herein, the phrase “consisting essentially of” limits the scope of a claim to the specified materials or steps and those that do not materially affect the basic and novel characteristic(s) of the claimed invention.

[0047] The person of ordinary skill in the art would readily understand and appreciate that the compounds and compositions disclosed herein may have certain atoms (e.g., N, O, or S atoms) in a protonated or deprotonated state, depending upon the environment in which the compound or composition is placed. Accordingly, as used herein, the structures disclosed herein envisage that certain functional groups, such as, for example, OH, SH, or NH, may be protonated or deprotonated. The disclosure herein is intended to cover the disclosed compounds and compositions regardless of their state of protonation based on the environment (such as pH), as would be readily understood by the person of ordinary skill in the art. Correspondingly, compounds described herein with labile protons or basic atoms should also be understood to represent salt forms of the corresponding compound. Compounds described herein may be in a free acid, free base, or salt form. Pharmaceutically acceptable salts of the compounds described herein should be understood to be within the scope of the invention.

[0048] As used herein, the term “linked” or “conjugated” when referring to the connection between two compounds or molecules means that two compounds or molecules are joined by a covalent bond. Unless stated, the terms “linked” and “conjugated” as used herein may refer to the connection between a first compound and a second compound either with or without any intervening atoms or groups of atoms.

[0049] As used herein, the term “including” is used to herein mean, and is used interchangeably with, the phrase “including but not limited to.” The term “or” is used herein to mean, and is used interchangeably with, the term “and/or,” unless the context clearly indicates otherwise.

[0050] Unless otherwise defined, all technical and scientific terms used herein have the same meaning as commonly understood by one of ordinary skill in the art. Although methods and materials similar or equivalent to those described herein can be used in the practice or testing of the present invention, suitable methods and materials are described below. All publications, patent applications, patents, and other references mentioned herein are incorporated by reference in their entirety. In case of conflict, the present specification, including definitions, will control. In addition, the materials, methods, and examples are illustrative only and not intended to be limiting.

[0051] Other objects, features, aspects, and advantages of the invention will be apparent from the following detailed description, accompanying figures, and from the claims.

### BRIEF DESCRIPTION OF THE DRAWINGS

[0052] FIG. 1. Chemical structure representation of the tridentate αvβ6 epithelial cell targeting ligand referred to herein as Tri-SM6.1-αvβ6-(TA14).

[0053] FIG. 2. Immunohistochemistry (IHC) staining for anti-hemagglutinin (anti-HA) of mice administered with saline (no IAV RNAi agent) and with RNAi agent AC002564, as more fully described in Example 4.

[0054] FIG. 3. Bar graph showing lung viral load of CA07 H1N1 of mice infected with PBS or CA07, and subsequently administered saline, IAV RNAi agents, or Oseltamivir, as more fully described in Example 32.

[0055] FIG. 4. Bar graph showing percent of total inflammation of mice lungs infected with PBS or CA07, and subsequently administered saline, IAV RNAi agents, or Oseltamivir, as more fully described in Example 32.

[0056] FIG. 5. Histology of inflammation of mice lungs infected with PBS or CA07, and subsequently administered saline, IAV RNAi agents, or Oseltamivir, as more fully described in Example 32.

[0057] FIG. 6A. Lung viral load of mice test animals dosed with IAV RNAi agents, prior to and after infection with H5N1, as more fully described in Example 36.

[0058] FIG. 6B. Body weight of mice test animals dosed with IAV RNAi agents, prior to and after infection with H5N1, as more fully described in Example 36.

[0059] FIG. 6C. Clinical scores of mice test animals dosed with IAV RNAi agents, prior to and after infection with H5N1, as more fully described in Example 36.

[0060] FIG. 7A. Body weight of mice test animals dosed with IAV RNAi agents, prior to infection with H5N1, as more fully described in Example 37.

[0061] FIG. 7B. Body weight of mice test animals dosed with IAV RNAi agents, after infection with H5N1, as more fully described in Example 37.

[0062] FIG. 7C. Clinical scores of mice test animals dosed with IAV RNAi agents, prior to and after infection with H5N1, as more fully described in Example 37.

[0063] FIG. 7D. Survival index of the test animals treated IAV RNAi agents, prior to and after infection with H5N1, as more fully described in Example 37.

[0064] FIG. 7E. Lung viral load of mice test animals dosed with IAV RNAi agents, prior to and after infection with H5N1, as more fully described in Example 37.

[0065] FIG. 8. Lung weight and lung weight of total body weight, of test animals administered IAV RNAi agents, as more fully described in Example 38.

### DETAILED DESCRIPTION

### RNAi Agents

[0066] Described herein are RNAi agents for inhibiting expression of an influenza A viral gene transcript or genome (referred to herein as IAV RNAi agents or IAV RNAi triggers). Each IAV RNAi agent disclosed herein comprises a sense strand and an antisense strand. The sense strand can be 15 to 49 nucleotides in length, and the antisense strand can be 18 to 49 nucleotides in length. The sense and antisense strands can be either the same length or they can be different lengths. In some embodiments, the sense and antisense strands are each independently 18 to 27 nucleotides in length. In some embodiments, both the sense and antisense strands are each 19-26 nucleotides in length. In some embodiments, the sense and antisense strands are each 21-24 nucleotides in length. In some embodiments, the sense and antisense strands are each independently 19-21 nucleotides in length. In some embodiments, the sense strand is about 19 nucleotides in length while the antisense strand is about 21 nucleotides in length. In some embodiments, the sense strand is about 21 nucleotides in length while the antisense strand is about 23 nucleotides in length. In some embodiments, a sense strand is 23 nucleotides in length and an antisense strand is 21 nucleotides in length. In some embodiments, both the sense and antisense strands are each 21 nucleotides in length. In some embodiments, the RNAi agent sense strands are 15, 16, 17, 18, 19, 20, 21, 22, 23, 24, 25, 26, 27, 28, 29, 30, 31, 32, 33, 34, 35, 36, 37, 38, or 39 nucleotides in length. In some embodiments, the RNAi agent antisense strands are 18, 19, 20, 21, 22, 23, 24, 25, 26, 27, 28, 29, 30, 31, 32, 33, 34, 35, 36, 37, 38, or 39 nucleotides in length. In some embodiments, a double-stranded RNAi agent has a duplex length of about 16, 17, 18, 19, 20, 21, 22, 23 or 24 nucleotides.

[0067] Examples of nucleotide sequences used in forming IAV RNAi agents are provided in Tables 2A, 2B, 2C, 2D, 2E, 2F, 3A, 3B, 3C, 3D, 3E, 3F, 4A, 4B, 4C, 4D, 4E, 4F, 5A, 5B, 5C, 5D, 5E, 5F, 6A, 6B, 6C, 6D, 6E, 6F, 10A, 10B, 10C, 10D, 10E, and 10F. Examples of RNAi agent duplexes, that include the sense strand and antisense strand sequences in Tables 2A, 2B, 2C, 2D, 2E, 2F, 3A, 3B, 3C, 3D, 3E, 3F, 4A, 4B, 4C, 4D, 4E, 4F, 5A, 5B, 5C, 5D, 5E, 5F, 6A, 6B, 6C, 6D, 6E, and 6F are shown in Tables 7A-1, 7A-2, 7A-3, 7A-4, 7A-5, 7A-6, 7B-1, 7B-2, 7B-3, 7B-4, 7B-5, 7B-6, 8A, 8B, 8C, 8D, 8E, 8F, 9A, 9B, 9C, 9D, 9E, 9F, and 10A, 10B, 10C, 10D, 10E, and 10F.

[0068] In some embodiments, the region of perfect, substantial, or partial complementarity between the sense strand and the antisense strand is 15-26 (e.g., 15, 16, 17, 18, 19, 20, 21, 22, 23, 24, 25, or 26) nucleotides in length and occurs at or near the 5′ end of the antisense strand (e.g., this region may be separated from the 5′ end of the antisense strand by 0, 1, 2, 3, or 4 nucleotides that are not perfectly, substantially, or partially complementary).

[0069] A sense strand of the IAV RNAi agents described herein includes at least 15 consecutive nucleotides that have at least 85% identity to a core stretch sequence (also referred to herein as a “core stretch” or “core sequence”) of the same number of nucleotides in an influenza A viral genome RNA (including all viral RNA as well as viral mRNA). In some embodiments, a sense strand core stretch sequence is 100% (perfectly) complementary or at least about 85% (substantially) complementary to a core stretch sequence in the antisense strand, and thus the sense strand core stretch sequence is typically perfectly identical or at least about 85% identical to a nucleotide sequence of the same length (sometimes referred to, e.g., as a target sequence) present in the influenza A viral genome RNA target, which as noted elsewhere is a target sequence that is known to be conserved across a variety of influenza A viral genomes. In some embodiments, this sense strand core stretch is 15, 16, 17, 18, 19, 20, 21, 22, or 23 nucleotides in length. In some embodiments, this sense strand core stretch is 17 nucleotides in length. In some embodiments, this sense strand core stretch is 19 nucleotides in length.

[0070] An antisense strand of an IAV RNAi agent described herein includes at least 17 consecutive nucleotides that have at least 85% complementarity to a core stretch of the same number of nucleotides in an influenza A viral genome RNA or another influenza RNA being targeted, and at least 15 consecutive nucleotides that have at least 85% complementarity to a core stretch of the same number of nucleotides to a core stretch of the same number of nucleotides in the corresponding sense strand. In some embodiments, an antisense strand core stretch is 100% (perfectly) complementary or at least about 85% (substantially) complementary to a nucleotide sequence (e.g., target sequence) of the same length present in an influenza A viral genome RNA target. In some embodiments, this antisense strand core stretch is 15, 16, 17, 18, 19, 20, 21, 22, or 23 nucleotides in length. In some embodiments, this antisense strand core stretch is 19 nucleotides in length. In some embodiments, this antisense strand core stretch is 17 nucleotides in length. A sense strand core stretch sequence can be the same length as a corresponding antisense core sequence or it can be a different length.

[0071] The IAV RNAi agent sense and antisense strands anneal to form a duplex. A sense strand and an antisense strand of an IAV RNAi agent can be partially, substantially, or fully complementary to each other. Within the complementary duplex region, the sense strand core stretch sequence is at least 85% complementary or 100% complementary to the antisense core stretch sequence. In some embodiments, the sense strand core stretch sequence contains a sequence of at least 15, at least 16, at least 17, at least 18, at least 19, at least 20, at least 21, at least 22, or at least 23 nucleotides that is at least 85% or 100% complementary to a corresponding 15, 16, 17, 18, 19, 20, 21, 22, or 23 nucleotide sequence of the antisense strand core stretch sequence (i.e., the sense and antisense core stretch sequences of an IAV RNAi agent have a region of at least 15, at least 16, at least 17, at least 18, at least 19, at least 20, at least 21, at least 22, or at least 23 nucleotides that is at least 85% base paired or 100% base paired.)

[0072] In some embodiments, the antisense strand of an IAV RNAi agent disclosed herein differs by 0, 1, 2, or 3 nucleotides from any of the antisense strand sequences in Table 2A, 2B, 2C, 2D, 2E, 2F, 3A, 3B, 3C, 3D, 3E, or 3F. In some embodiments, the sense strand of an IAV RNAi agent disclosed herein differs by 0, 1, 2, or 3 nucleotides from any of the sense strand sequences in Table 2A, 2B, 2C, 2D, 2E, 2F, 4A, 4B, 4C, 4D, 4E, 4F, 5A, 5B, 5C, 5D, 5E, 5F, 6A, 6B, 6C, 6D, 6E, 6F, 10A, 10B, 10C, 10D, 10E, or 10F.

[0073] In some embodiments, the sense strand and/or the antisense strand can optionally and independently contain an additional 1, 2, 3, 4, 5, or 6 nucleotides (extension) at the 3′ end, the 5′ end, or both the 3′ and 5′ ends of the core stretch sequences. The antisense strand additional nucleotides, if present, may or may not be complementary to the corresponding sequence in an influenza A viral genome RNA. The sense strand additional nucleotides, if present, may or may not be identical to the corresponding sequence in an influenza A viral genome RNA. The antisense strand additional nucleotides, if present, may or may not be complementary to the corresponding sense strand's additional nucleotides, if present.

[0074] As used herein, an extension comprises 1, 2, 3, 4, 5, or 6 nucleotides at the 5′ and/or 3′ end of the sense strand core stretch sequence and/or antisense strand core stretch sequence. The extension nucleotides on a sense strand may or may not be complementary to nucleotides, either core stretch sequence nucleotides or extension nucleotides, in the corresponding antisense strand. Conversely, the extension nucleotides on an antisense strand may or may not be complementary to nucleotides, either core stretch nucleotides or extension nucleotides, in the corresponding sense strand. In some embodiments, both the sense strand and the antisense strand of an RNAi agent contain 3′ and 5′ extensions. In some embodiments, one or more of the 3′ extension nucleotides of one strand base pairs with one or more 5′ extension nucleotides of the other strand. In other embodiments, one or more of 3′ extension nucleotides of one strand do not base pair with one or more 5′ extension nucleotides of the other strand. In some embodiments, an IAV RNAi agent has an antisense strand having a 3′ extension and a sense strand having a 5′ extension. In some embodiments, the extension nucleotide(s) are unpaired and form an overhang. As used herein, an “overhang” refers to a stretch of one or more unpaired nucleotides located at a terminal end of either the sense strand or the antisense strand that does not form part of the hybridized or duplexed portion of an RNAi agent disclosed herein.

[0075] In some embodiments, an IAV RNAi agent comprises an antisense strand having a 3′ extension of 1, 2, 3, 4, 5, or 6 nucleotides in length. In other embodiments, an IAV RNAi agent comprises an antisense strand having a 3′ extension of 1, 2, or 3 nucleotides in length. In some embodiments, one or more of the antisense strand extension nucleotides comprise nucleotides that are complementary to the corresponding Influenza A viral genome RNA sequence. In some embodiments, one or more of the antisense strand extension nucleotides comprise nucleotides that are not complementary to the corresponding Influenza A viral genome RNA sequence.

[0076] In some embodiments, an IAV RNAi agent comprises a sense strand having a 3′ extension of 1, 2, 3, 4, or 5 nucleotides in length. In some embodiments, one or more of the sense strand extension nucleotides comprises adenosine, uracil, or thymidine nucleotides, AT dinucleotide, or nucleotides that correspond to or are the identical to nucleotides in an influenza A viral genome RNA sequence. In some embodiments, the 3′ sense strand extension includes or consists of one of the following sequences, but is not limited to: T, UT, TT, UU, UUT, TTT, or TTTT (each listed 5′ to 3′).

[0077] A sense strand can have a 3′ extension and/or a 5′ extension. In some embodiments, an IAV RNAi agent comprises a sense strand having a 5′ extension of 1, 2, 3, 4, 5, or 6 nucleotides in length. In some embodiments, one or more of the sense strand extension nucleotides comprise nucleotides that correspond to or are identical to nucleotides in an influenza A viral genome RNA sequence.

[0078] Examples of sequences used in forming IAV RNAi agents are provided in Tables 2A, 2B, 2C, 2D, 2E, 2F, 3A, 3B, 3C, 3D, 3E, 3F, 4A, 4B, 4C, 4D, 4E, 4F, 5A, 5B, 5C, 5D, 5E, 5F, 6A, 6B, 6C, 6D, 6E, 6F, 10A, 10B, 10C, 10D, 10E, and 10F. In some embodiments, an IAV RNAi agent antisense strand includes a sequence of any of the sequences in Tables 2A, 2B, 2C, 2D, 2E, 2F, 3A, 3B, 3C, 3D, 3E, 3F, 10A, 10B, 10C, 10D, 10E, or 10F. In certain embodiments, an IAV RNAi agent antisense strand comprises or consists of any one of the modified sequences in Table 3A, 3B, 3C, 3D, 3E, or 3F. In some embodiments, an IAV RNAi agent antisense strand includes the sequence of nucleotides (from 5′ end→3′ end) 1-17, 2-15, 2-17, 1-18, 2-18, 1-19, 2-19, 1-20, 2-20, 1-21, or 2-21, of any of the sequences in Tables 2A, 2B, 2C, 2D, 2E, 2F, 3A, 3B, 3C, 3D, 3E, or 3F. In some embodiments, an IAV RNAi agent sense strand includes the sequence of any of the sequences in Tables 2A, 2B, 2C, 2D, 2E, 2F, 4A, 4B, 4C, 4D, 4E, 4F, 5A, 5B, 5C, 5D, 5E, 5F, 6A, 6B, 6C, 6D, 6E, or 6F. In some embodiments, an IAV RNAi agent sense strand includes the sequence of nucleotides (from 5′ end→3′ end) 1-18, 1-19, 1-20, 1-21, 2-19, 2-20, 2-21, 3-20, 3-21, or 4-21 of any of the sequences in Tables 2A, 2B, 2C, 2D, 2E, 2F, 4A, 4B, 4C, 4D, 4E, 4F, 5A, 5B, 5C, 5D, 5E, 5F, 6A, 6B, 6C, 6D, 6E, or 6F. In certain embodiments, an IAV RNAi agent sense strand comprises or consists of a modified sequence of any one of the modified sequences in Table 4A, 4B, 4C, 4D, 4E, 4F, 5A, 5B, 5C, 5D, 5E, 5F, 6A, 6B, 6C, 6D, 6E, 6F, 10A, 10B, 10C, 10D, 10E, or 10F.

[0079] In some embodiments, the sense and antisense strands of the RNAi agents described herein contain the same number of nucleotides. In some embodiments, the sense and antisense strands of the RNAi agents described herein contain different numbers of nucleotides. In some embodiments, the sense strand 5′ end and the antisense strand 3′ end of an RNAi agent form a blunt end. In some embodiments, the sense strand 3′ end and the antisense strand 5′ end of an RNAi agent form a blunt end. In some embodiments, both ends of an RNAi agent form blunt ends. In some embodiments, neither end of an RNAi agent is blunt-ended. As used herein a “blunt end” refers to an end of a double stranded RNAi agent in which the terminal nucleotides of the two annealed strands are complementary (form a complementary base-pair).

[0080] In some embodiments, the sense strand 5′ end and the antisense strand 3′ end of an RNAi agent form a frayed end. In some embodiments, the sense strand 3′ end and the antisense strand 5′ end of an RNAi agent form a frayed end. In some embodiments, both ends of an RNAi agent form a frayed end. In some embodiments, neither end of an RNAi agent is a frayed end. As used herein a frayed end refers to an end of a double stranded RNAi agent in which the terminal nucleotides of the two annealed strands form a pair (i.e., do not form an overhang) but are not complementary (i.e. form a non-complementary pair). In some embodiments, one or more unpaired nucleotides at the end of one strand of a double stranded RNAi agent form an overhang. The unpaired nucleotides may be on the sense strand or the antisense strand, creating either 3′ or 5′ overhangs. In some embodiments, the RNAi agent contains: a blunt end and a frayed end, a blunt end and 5′ overhang end, a blunt end and a 3′ overhang end, a frayed end and a 5′ overhang end, a frayed end and a 3′ overhang end, two 5′ overhang ends, two 3′ overhang ends, a 5′ overhang end and a 3′ overhang end, two frayed ends, or two blunt ends. Typically, when present, overhangs are located at the 3′ terminal ends of the sense strand, the antisense strand, or both the sense strand and the antisense strand.

[0081] The IAV RNAi agents disclosed herein may also be comprised of one or more modified nucleotides. In some embodiments, substantially all of the nucleotides of the sense strand and substantially all of the nucleotides of the antisense strand of the IAV RNAi agent are modified nucleotides. The IAV RNAi agents disclosed herein may further be comprised of one or more modified internucleoside linkages, e.g., one or more phosphorothioate or phosphorodithioate linkages. In some embodiments, an IAV RNAi agent contains one or more modified nucleotides and one or more modified internucleoside linkages. In some embodiments, a 2′-modified nucleotide is combined with modified internucleoside linkage.

[0082] In some embodiments, an IAV RNAi agent is prepared or provided as a salt, mixed salt, or a free-acid. In some embodiments, an IAV RNAi agent is prepared as a pharmaceutically acceptable salt. In some embodiments, an IAV RNAi agent is prepared as a pharmaceutically acceptable sodium salt. Such forms that are well known in the art are within the scope of the inventions disclosed herein.

### Modified Nucleotides

[0083] Modified nucleotides, when used in various oligonucleotide constructs, can preserve activity of the compound in cells while at the same time increasing the serum stability of these compounds, and can also minimize the possibility of activating interferon activity in humans upon administration of the oligonucleotide construct.

[0084] In some embodiments, an IAV RNAi agent contains one or more modified nucleotides. As used herein, a “modified nucleotide” is a nucleotide other than a ribonucleotide (2′-hydroxyl nucleotide). In some embodiments, at least 50% (e.g., at least 60%, at least 70%, at least 80%, at least 90%, at least 95%, at least 97%, at least 98%, at least 99%, or 100%) of the nucleotides are modified nucleotides. As used herein, modified nucleotides can include, but are not limited to, deoxyribonucleotides, nucleotide mimics, abasic nucleotides, 2′-modified nucleotides, inverted nucleotides, modified nucleobase-comprising nucleotides, bridged nucleotides, peptide nucleic acids (PNAs), 2′,3′-seco nucleotide mimics (unlocked nucleobase analogues), locked nucleotides, 3′-O-methoxy (2′ internucleoside linked) nucleotides, 2′-F-Arabino nucleotides, 5′-Me, 2′-fluoro nucleotide, morpholino nucleotides, vinyl phosphonate deoxyribonucleotides, vinyl phosphonate-containing nucleotides, and cyclopropyl phosphonate-containing nucleotides. 2′-modified nucleotides (i.e., a nucleotide with a group other than a hydroxyl group at the 2′ position of the five-membered sugar ring) include, but are not limited to, 2′-O-methyl nucleotides (also referred to as 2′-methoxy nucleotides), 2′-fluoro nucleotides (also referred to herein as 2′-deoxy-2′-fluoro nucleotides), 2′-deoxy nucleotides, 2′-methoxyethyl (2′-O-2-methoxylethyl) nucleotides (also referred to as 2′-MOE), 2′-amino nucleotides, and 2′-alkyl nucleotides. It is not necessary for all positions in a given compound to be uniformly modified. Conversely, more than one modification can be incorporated in a single IAV RNAi agent or even in a single nucleotide thereof. The IAV RNAi agent sense strands and antisense strands can be synthesized and/or modified by methods known in the art. Modification at one nucleotide is independent of modification at another nucleotide.

[0085] Modified nucleobases include synthetic and natural nucleobases, such as 5-substituted pyrimidines, 6-azapyrimidines and N-2, N-6 and O-6 substituted purines, (e.g., 2-aminopropyladenine, 5-propynyluracil, or 5-propynylcytosine), 5-methylcytosine (5-me-C), 5-hydroxymethyl cytosine, inosine, xanthine, hypoxanthine, 2-aminoadenine, 6-alkyl (e.g., 6-methyl, 6-ethyl, 6-isopropyl, or 6-n-butyl) derivatives of adenine and guanine, 2-alkyl (e.g., 2-methyl, 2-ethyl, 2-isopropyl, or 2-n-butyl) and other alkyl derivatives of adenine and guanine, 2-thiouracil, 2-thiothymine, 2-thiocytosine, 5-halouracil, cytosine, 5-propynyl uracil, 5-propynyl cytosine, 6-azo uracil, 6-azo cytosine, 6-azo thymine, 5-uracil (pseudouracil), 4-thiouracil, 8-halo, 8-amino, 8-sulflydryl, 8-thioalkyl, 8-hydroxyl and other 8-substituted adenines and guanines, 5-halo (e.g., 5-bromo), 5-trifluoromethyl, and other 5-substituted uracils and cytosines, 7-methylguanine and 7-methyladenine, 8-azaguanine and 8-azaadenine, 7-deazaguanine, 7-deazaadenine, 3-deazaguanine, and 3-deazaadenine.

[0086] In some embodiments, the 5′ and/or 3′ end of the antisense strand can include abasic residues (Ab), which can also be referred to as an “abasic site” or “abasic nucleotide.” An abasic residue (Ab) is a nucleotide or nucleoside that lacks a nucleobase at the 1′ position of the sugar moiety. (See, e.g., U.S. Pat. No. 5,998,203). In some embodiments, an abasic residue can be placed internally in a nucleotide sequence. In some embodiments, Ab or AbAb can be added to the 3′ end of the antisense strand. In some embodiments, the 5′ end of the sense strand can include one or more additional abasic residues (e.g., (Ab) or (AbAb)). In some embodiments, UUAb, UAb, or Ab are added to the 3′ end of the sense strand. In some embodiments, an abasic (deoxyribose) residue can be replaced with a ribitol (abasic ribose) residue.

[0087] In some embodiments, all or substantially all of the nucleotides of an RNAi agent are modified nucleotides. As used herein, an RNAi agent wherein substantially all of the nucleotides present are modified nucleotides is an RNAi agent having four or fewer (i.e., 0, 1, 2, 3, or 4) nucleotides in both the sense strand and the antisense strand being ribonucleotides (i.e., unmodified). As used herein, a sense strand wherein substantially all of the nucleotides present are modified nucleotides is a sense strand having two or fewer (i.e., 0, 1, or 2) nucleotides in the sense strand being unmodified ribonucleotides. As used herein, an antisense sense strand wherein substantially all of the nucleotides present are modified nucleotides is an antisense strand having two or fewer (i.e., 0, 1, or 2) nucleotides in the antisense strand being unmodified ribonucleotides. In some embodiments, one or more nucleotides of an RNAi agent is an unmodified ribonucleotide. Chemical structures for certain modified nucleotides are set forth in Table 11 herein.

### Modified Internucleoside Linkages

[0088] In some embodiments, one or more nucleotides of an IAV RNAi agent are linked by non-standard linkages or backbones (i.e., modified internucleoside linkages or modified backbones). Modified internucleoside linkages or backbones include, but are not limited to, phosphorothioate groups (represented herein as a lower case “s”), chiral phosphorothioates, thiophosphates, phosphorodithioates, phosphotriesters, aminoalkyl-phosphotriesters, alkyl phosphonates (e.g., methyl phosphonates or 3′-alkylene phosphonates), chiral phosphonates, phosphinates, phosphoramidates (e.g., 3′-amino phosphoramidate, aminoalkylphosphoramidates, or thionophosphoramidates), thionoalkyl-phosphonates, thionoalkylphosphotriesters, morpholino linkages, boranophosphates having normal 3′-5′ linkages, 2′-5′ linked analogs of boranophosphates, or boranophosphates having inverted polarity wherein the adjacent pairs of nucleoside units are linked 3′-5′ to 5′-3′ or 2′-5′ to 5′-2′. In some embodiments, a modified internucleoside linkage or backbone lacks a phosphorus atom. Modified internucleoside linkages lacking a phosphorus atom include, but are not limited to, short chain alkyl or cycloalkyl inter-sugar linkages, mixed heteroatom and alkyl or cycloalkyl inter-sugar linkages, or one or more short chain heteroatomic or heterocyclic inter-sugar linkages. In some embodiments, modified internucleoside backbones include, but are not limited to, siloxane backbones, sulfide backbones, sulfoxide backbones, sulfone backbones, formacetyl and thioformacetyl backbones, methylene formacetyl and thioformacetyl backbones, alkene-containing backbones, sulfamate backbones, methyleneimino and methylenehydrazino backbones, sulfonate and sulfonamide backbones, amide backbones, and other backbones having mixed N, O, S, and CH₂ components.

[0089] In some embodiments, a sense strand of an IAV RNAi agent can contain 1, 2, 3, 4, 5, or 6 phosphorothioate linkages, an antisense strand of an IAV RNAi agent can contain 1, 2, 3, 4, 5, or 6 phosphorothioate linkages, or both the sense strand and the antisense strand independently can contain 1, 2, 3, 4, 5, or 6 phosphorothioate linkages. In some embodiments, a sense strand of an IAV RNAi agent can contain 1, 2, 3, or 4 phosphorothioate linkages, an antisense strand of an IAV RNAi agent can contain 1, 2, 3, or 4 phosphorothioate linkages, or both the sense strand and the antisense strand independently can contain 1, 2, 3, or 4 phosphorothioate linkages.

[0090] In some embodiments, an IAV RNAi agent sense strand contains at least two phosphorothioate internucleoside linkages. In some embodiments, the phosphorothioate internucleoside linkages are between the nucleotides at positions 1-3 from the 3′ end of the sense strand. In some embodiments, one phosphorothioate internucleoside linkage is at the 5′ end of the sense strand nucleotide sequence, and another phosphorothioate linkage is at the 3′ end of the sense strand nucleotide sequence. In some embodiments, two phosphorothioate internucleoside linkage are located at the 5′ end of the sense strand, and another phosphorothioate linkage is at the 3′ end of the sense strand. In some embodiments, the sense strand does not include any phosphorothioate internucleoside linkages between the nucleotides, but contains one, two, or three phosphorothioate linkages between the terminal nucleotides on both the 5′ and 3′ ends and the optionally present inverted abasic residue terminal caps. In some embodiments, the targeting ligand is linked to the sense strand via a phosphorothioate linkage.

[0091] In some embodiments, an IAV RNAi agent antisense strand contains four phosphorothioate internucleoside linkages. In some embodiments, the four phosphorothioate internucleoside linkages are between the nucleotides at positions 1-3 from the 5′ end of the antisense strand and between the nucleotides at positions 19-21, 20-22, 21-23, 22-24, 23-25, or 24-26 from the 5′ end. In some embodiments, three phosphorothioate internucleoside linkages are located between positions 1-4 from the 5′ end of the antisense strand, and a fourth phosphorothioate internucleoside linkage is located between positions 20-21 from the 5′ end of the antisense strand. In some embodiments, an IAV RNAi agent contains at least three or four phosphorothioate internucleoside linkages in the antisense strand.

### Capping Residues or Moieties

[0092] In some embodiments, the sense strand may include one or more capping residues or moieties, sometimes referred to in the art as a “cap,” a “terminal cap,” or a “capping residue.” As used herein, a “capping residue” is a non-nucleotide compound or other moiety that can be incorporated at one or more termini of a nucleotide sequence of an RNAi agent disclosed herein. A capping residue can provide the RNAi agent, in some instances, with certain beneficial properties, such as, for example, protection against exonuclease degradation. In some embodiments, inverted abasic residues (invAb) (also referred to in the art as “inverted abasic sites”) are added as capping residues (see Table 11). (See, e.g., F. Czauderna, Nucleic Acids Res., 2003, 31(11), 2705-16). Capping residues are generally known in the art, and include, for example, inverted abasic residues as well as carbon chains such as a terminal C₃H₇ (propyl), C₆H₁₃ (hexyl), or C₁₂H₂₅ (dodecyl) groups. In some embodiments, a capping residue is present at either the 5′ terminal end, the 3′ terminal end, or both the 5′ and 3′ terminal ends of the sense strand. In some embodiments, the 5′ end and/or the 3′ end of the sense strand may include more than one inverted abasic deoxyribose moiety as a capping residue.

[0093] In some embodiments, one or more inverted abasic residues (invAb) are added to the 3′ end of the sense strand. In some embodiments, one or more inverted abasic residues (invAb) are added to the 5′ end of the sense strand. In some embodiments, one or more inverted abasic residues or inverted abasic sites are inserted between the targeting ligand and the nucleotide sequence of the sense strand of the RNAi agent. In some embodiments, the inclusion of one or more inverted abasic residues or inverted abasic sites at or near the terminal end or terminal ends of the sense strand of an RNAi agent allows for enhanced activity or other desired properties of an RNAi agent.

[0094] In some embodiments, one or more inverted abasic residues (invAb) are added to the 5′ end of the sense strand. In some embodiments, one or more inverted abasic residues can be inserted between the targeting ligand and the nucleotide sequence of the sense strand of the RNAi agent. The inverted abasic residues may be linked via phosphate, phosphorothioate (e.g., shown herein as (invAb)s)), or other internucleoside linkages. In some embodiments, the inclusion of one or more inverted abasic residues at or near the terminal end or terminal ends of the sense strand of an RNAi agent may allow for enhanced activity or other desired properties of an RNAi agent. In some embodiments, an inverted abasic (deoxyribose) residue can be replaced with an inverted ribitol (abasic ribose) residue. In some embodiments, the 3′ end of the antisense strand core stretch sequence, or the 3′ end of the antisense strand sequence, may include an inverted abasic residue. The chemical structures for inverted abasic deoxyribose residues are shown in Table 11 below.

### IAV RNAi Agents

[0095] The IAV RNAi agents disclosed herein are designed to target specific positions on an influenza A viral genome (e.g., SEQ ID NO:1 (NC_026431.1), and SEQ ID NOS: 2-6)), and these specific targeted positions were selected in part because they also had sequences conserved across various other influenza genomes. As defined herein, an antisense strand sequence is designed to target an influenza A viral genome viral genome at a given position on the genome when the 5′ terminal nucleobase of the antisense strand is aligned with a position that is 21 nucleotides downstream (towards the 3′ end) from the position on the genome when base pairing to the gene or viral genome. For example, as illustrated in Tables 1A, 1B, 1C, 1D, 1E, 1F, 2A, 2B, 2C, 2D, 2E, and 2F herein, an antisense strand sequence designed to target an influenza A viral genome at position 150 requires that when base pairing to the genome, the 5′ terminal nucleobase of the antisense strand is aligned with position 170 of an influenza A viral genome.

[0096] As provided herein, an IAV RNAi agent does not require that the nucleobase at position 1 (5′→3′) of the antisense strand be complementary to the viral genome, provided that there is at least 85% complementarity (e.g., at least 85, 86, 87, 88, 89, 90, 91, 92, 93, 94, 95, 96, 97, 98, 99, or 100% complementarity) of the antisense strand and the viral genome across a core stretch sequence of at least 17 consecutive nucleotides. For example, for an IAV RNAi agent disclosed herein that is designed to target position 150 of an influenza A viral genome viral genome, the 5′ terminal nucleobase of the antisense strand of the of the IAV RNAi agent must be aligned with position 170 of the respective genome; however, the 5′ terminal nucleobase of the antisense strand may be, but is not required to be, complementary to position 170 of an influenza A viral genome viral genome, provided that there is at least 85% complementarity (e.g., at least 85, 86, 87, 88, 89, 90, 91, 92, 93, 94, 95, 96, 97, 98, 99, or 100% complementarity) of the antisense strand and the viral genome transcript across a core stretch sequence of at least 17 consecutive nucleotides. As shown by, among other things, the various examples disclosed herein, the specific site of binding of the genome by the antisense strand of the IAV RNAi agent (e.g., whether the IAV RNAi agent is designed to target an influenza A viral genome viral genome at position 150, at position 429, at position 1217, or at some other position) is an important factor to the level of inhibition achieved by the IAV RNAi agent. (See, e.g., Kamola et al., The siRNA Non-seed Region and Its Target Sequences are Auxiliary Determinants of Off-Target Effects, PLOS Computational Biology, 11(12), FIG. 1 (2015)).

[0097] In some embodiments, the IAV RNAi agents disclosed herein target an influenza A viral genome viral genome at or near the positions of the respective influenza A viral genome sequences as shown in Table 1A, 1B, 1 C, 1D, 1E, and 1F. In some embodiments, the antisense strand of an IAV RNAi agent disclosed herein includes a core stretch sequence that is fully, substantially, or at least partially complementary to a target influenza A viral genome 19-mer sequence disclosed in Table 1A, 1B, 1C, 1D, 1E, and 1F.

TABLE 1A
Influenza A viral genome 19-mer Target Sequences (Targeting regions of
Influenza A virus (A/California/07/2009(H1N1)) segment 7 matrix protein 2
(M2) and matrix protein 1 (M1) genes (SEQ ID NO: 1))

| | Influenza A viral | | Targeted Viral |
|---|---|---|---|
| | genome 19-mer | Corresponding | Genome Position |
| SEQ ID | Target Sequences | Positions of Sequence | (as referred to |
| No. | (5′→3′) | on SEQ ID NO: 1 | herein) |
| 7 | AACCGAGGUCGAAACGUAC | 12-30 | 10 |
| 8 | GUACGUUCUUUCUAUCAUC | 27-45 | 25 |
| 9 | ACAAGACCAAUCUUGUCAC | 142-160 | 140 |
| 10 | AAUCUUGUCACCUCUGACU | 150-168 | 148 |
| 11 | UCUUGUCACCUCUGACUAA | 152-170 | 150 |
| 12 | CGAACAACAUGGAUAGAGC | 269-287 | 267 |
| 13 | CAACAUGGAUAGAGCAGUU | 273-291 | 271 |
| 14 | UCACUAAGCUAUUCAACUG | 346-364 | 344 |
| 15 | CAACUGGUGCACUUGCCAG | 359-377 | 357 |
| 16 | UGACCACAGAAGCUGCUUU | 413-431 | 411 |
| 17 | ACCAAUCCACUAAUCAGGC | 505-523 | 503 |
| 18 | CUAUUGGGACUCAUCCUAG | 653-671 | 651 |
| 19 | UGACGAUGGUCAUUUUGUC | 946-964 | 944 |
| 20 | GACGAUGGUCAUUUUGUCA | 947-965 | 945 |

TABLE 1B
Influenza A viral genome 19-mer Target Sequences (Targeting regions of
Influenza A virus (A/California/07/2009(H1N1)) segment 8 nuclear export
protein (NEP) and nonstructural protein 1 (NS1) genes (SEQ ID NO: 2))

| | Influenza A viral | | Targeted Viral |
|---|---|---|---|
| | genome 19-mer | Corresponding | Genome Position |
| SEQ ID | Target Sequences | Positions of Sequence | (as referred to |
| No. | (5′→3′) | on SEQ ID NO: 2 | herein) |
| 21 | GAUGCCCCAUUCCUUGAUC | 85-103 | 83 |
| 22 | AUGCCCCAUUCCUUGAUCG | 86-104 | 84 |
| 23 | UGCCCCAUUCCUUGAUCGG | 87-105 | 85 |
| 24 | GAAACAGCCACUCUUGUUG | 163-181 | 161 |
| 25 | AUCGUGGAAUGGAUCUUGA | 190-208 | 188 |
| 26 | UCUUGAAAGAGGAAUCCAG | 203-221 | 201 |
| 27 | GACAAUUGCAUCUGUACCU | 237-255 | 235 |
| 28 | GCAUCUGUACCUACUUCGC | 244-262 | 242 |
| 29 | GAGACUGGUUCAUGCUCAU | 299-317 | 297 |
| 30 | GACUGGUUCAUGCUCAUGC | 301-319 | 299 |
| 31 | UGAAAGCGAACUUCAGUGU | 389-407 | 387 |
| 32 | GAACUUCAGUGUAAUCUUU | 396-414 | 394 |
| 33 | CGAUUAGAGACCUUGAUAC | 418-436 | 416 |
| 34 | ACUACUAAGGGCUUUCACU | 435-453 | 433 |
| 35 | CUACUAAGGGCUUUCACUG | 436-454 | 434 |
| 36 | UCUCUUCCAGGACAUACUU | 493-511 | 491 |
| 37 | UGAGGAUGUCAAAAAUGCA | 513-531 | 511 |
| 38 | UGUCAAAAAUGCAGUUGGG | 519-537 | 517 |
| 39 | UGCAGUUGGGGUCCUCAUC | 528-546 | 526 |
| 40 | CAUCGGAGGACUUGAAUGG | 543-561 | 541 |
| 41 | AUCGGAGGACUUGAAUGGA | 544-562 | 542 |
| 42 | UCGGAGGACUUGAAUGGAA | 545-563 | 543 |
| 43 | GGAGGACUUGAAUGGAAUG | 547-565 | 545 |
| 44 | GAGGACUUGAAUGGAAUGG | 548-566 | 546 |
| 45 | UUGAAUGGAAUGGUAACAC | 554-572 | 552 |
| 46 | AUGGUAACACGGUUCGAGU | 563-581 | 561 |
| 47 | GUAACACGGUUCGAGUCUC | 566-584 | 564 |
| 48 | UACAGAGAUUCGCUUGGAG | 593-611 | 591 |
| 49 | GAUGAGAAUGGGAGACCUU | 619-637 | 617 |
| 50 | GAAUGGGAGACCUUCACUA | 624-642 | 622 |
| 51 | GACAGAGAAUAGUUUCGAA | 739-757 | 737 |
| 52 | UAUGCAAGCCUUACAACUA | 769-787 | 767 |
| 53 | AGAUAAGAGCUUUCUCGUU | 807-825 | 805 |
| 54 | CUUUCUCGUUUCAGCUUAU | 816-834 | 814 |

TABLE 1C
Influenza A viral genome 19-mer Target Sequences (Targeting regions of Influenza
A virus (A/California/07/2009(H1N1)) segment 2 polymerase PB1 (PB1) gene and
nonfunctional PB1-F2 protein (PB1-F2) gene (SEQ ID NO: 3))

| | | | Targeted Viral |
|---|---|---|---|
| | Influenza A viral genome 19-mer | Corresponding | Genome Position |
| SEQ ID | Target Sequences | Positions of Sequence | (as referred to |
| No. | (5′ → 3′) | on SEQ ID NO: 3 | herein) |
| 55 | GCCAUAAGCACCACAUUCC | 49-67 | 47 |
| 56 | ACCACAUUCCCUUAUACUG | 58-76 | 56 |
| 57 | ACAGAACACACCAAUACUC | 131-149 | 129 |
| 58 | AUGCCUUGAAACAAUGGAA | 318-336 | 316 |
| 59 | CCAACACCAUAGAAGUCUU | 431-449 | 429 |
| 60 | GUAAGAGACAACAUGACCA | 571-589 | 569 |
| 61 | GCAGAUUAGAGGUUUCGUA | 738-756 | 736 |
| 62 | GCAUUUGCGAAAAGCUUGA | 782-800 | 780 |
| 63 | CGAAAAGCUUGAACAGUCU | 789-807 | 787 |
| 64 | ACUGGGGACAACACUAAGU | 907-925 | 905 |
| 65 | CAAAAUGGCAAGACUAGGG | 1038-1056 | 1036 |
| 66 | AGUCCUGGGAUGAUGAUGG | 1210-1228 | 1208 |
| 67 | GGCAUGUUCAACAUGCUAA | 1228-1246 | 1226 |
| 68 | UCUCGAUACUGAAUCUUGG | 1262-1280 | 1260 |
| 69 | GGAGUGGACAGAUUCUACA | 1384-1402 | 1382 |
| 70 | AUUUGUGGCUAAUUUUAGC | 1500-1518 | 1498 |
| 71 | GUGAUAAAGAACAACAUGA | 1585-1603 | 1583 |
| 72 | GCUCUUCAAUUGUUCAUCA | 1639-1657 | 1637 |
| 73 | GAUGGAGGACCAAACUUAU | 1777-1795 | 1775 |
| 74 | AGGAUGAACAGAUGUACCA | 2051-2069 | 2049 |
| 75 | GGAAUUUCUAGCAUGGUGG | 2128-2146 | 2126 |
| 76 | UCAAGAAAGAAGAGUUCUC | 2204-2222 | 2202 |
| 77 | AGAUCAUGAAGAUCUGUUC | 2225-2243 | 2223 |
| 78 | AUCUGUUCCACCAUUGAAG | 2236-2254 | 2234 |
| 79 | CCACCAUUGAAGAACUCAG | 2243-2261 | 2241 |

TABLE 1D
Influenza A viral genome 19-mer Target Sequences (Targeting regions of Influenza
A virus (A/California/07/2009(H1N1)) segment 1 polymerase PB2 (PB2) gene (SEQ ID
NO: 4)

| | | | Targeted Viral |
|---|---|---|---|
| | Influenza A viral genome 19-mer | Corresponding | Genome Position |
| SEQ ID | Target Sequences | Positions of Sequence | (as referred to |
| No. | (5′ → 3′) | on SEQ ID NO: 4 | herein) |
| 80 | GAGAUACUCACUAAGACCA | 52-70 | 50 |
| 81 | UCGAAAGGUUGAAACAUGG | 365-383 | 363 |
| 82 | AUGGUGGCGUACAUGCUAG | 604-622 | 602 |
| 83 | GCUGCUAGAAACAUAGUAA | 784-802 | 782 |
| 84 | GACAAGCGGAUCAUCAGUC | 996-1014 | 994 |
| 85 | GAGGAUUGCAUGAUCAAGG | 1219-1237 | 1217 |
| 86 | GUGGUAGUGAGUAUUGACC | 1480-1498 | 1478 |
| 87 | AGGGAACGUACUAUUGUCU | 1524-1542 | 1522 |
| 88 | UGAUGUGGGAGAUCAAUGG | 1604-1622 | 1602 |
| 89 | UCGUAAGGACACUGUUCCA | 1784-1802 | 1782 |
| 90 | CAGUAUUCAAUUACAACAA | 1961-1979 | 1959 |
| 91 | GACUCUAGCAUACUUACUG | 2218-2236 | 2216 |

TABLE 1E
Influenza A viral genome 19-mer Target Sequences (Targeting regions of Influenza
A virus (A/California/07/2009(H1N1)) segment 5 nucleocapsid protein (NP) gene (SEQ ID
NO: 5))

| | | | Targeted Viral |
|---|---|---|---|
| | Influenza A viral genome 19-mer | Corresponding | Genome Position |
| SEQ ID | Target Sequences | Positions of Sequence | (as referred to |
| No. | (5′ → 3′) | on SEQ ID NO: 5 | herein) |
| 92 | GUCGGAAGAAUGAUUGGUG | 85-103 | 83 |
| 93 | GACUAAUCCAGAAUAGCAU | 164-182 | 162 |
| 94 | AGAGGAUGGUGCUUUCUGC | 191-209 | 189 |
| 95 | ACUCAUAUCAUGAUUUGGC | 400-418 | 398 |
| 96 | GAAUGAUGCCACAUAUCAG | 429-447 | 427 |
| 97 | UCUAAUGCAAGGUUCAACA | 495-513 | 493 |
| 98 | UCAGAAUGAUCAAACGUGG | 581-599 | 579 |
| 99 | CAAUGACCGAAAUUUCUGG | 603-621 | 601 |
| 100 | UGUGCAAUAUCCUCAAAGG | 665-683 | 663 |
| 101 | GGUCAGCACUCAUUCUGAG | 782-800 | 780 |
| 102 | AUCAGUUGCACAUAAAUCC | 804-822 | 802 |
| 103 | UCACAAGAGUCAAUUGGUG | 969-987 | 967 |
| 104 | GUAUCAAGUUUCAUAAGAG | 1027-1045 | 1025 |
| 105 | UGUGCAGCCUACAUUCUCA | 1221-1239 | 1219 |
| 106 | CUUCCUUUGACAUGAGUAA | 1430-1448 | 1428 |
| 107 | AAUGAAGGGUCUUAUUUCU | 1447-1465 | 1445 |

TABLE 1F
Influenza A viral genome 19-mer Target Sequences (Targeting regions of Influenza
A virus (A/California/07/2009(H1N1)) segment 3 polymerase PA (PA) gene (SEQ ID NO: 6))

| | | | Targeted Viral |
|---|---|---|---|
| | Influenza A viral genome 19-mer | Corresponding | Genome Position |
| SEQ ID | Target Sequences | Positions of Sequence | (as referred to |
| No. | (5′ → 3′) | on SEQ ID NO: 6 | herein) |
| 108 | CUUUGUGCGACAAUGCUUC | 9-27 | 7 |
| 109 | UAUUCGGAUUUCCAUUUCA | 142-160 | 140 |
| 110 | GGAAGAGACCGAAUCAUGG | 241-259 | 239 |
| 111 | AUCAAAACUAGGCUUUUCA | 511-529 | 509 |
| 112 | CUAUGGGAUUCCUUUCGUC | 559-577 | 557 |
| 113 | GGCGAAGAGACAAUUGAAG | 589-607 | 587 |
| 114 | CUAUGUAGAUGGAUUCGAG | 693-711 | 691 |
| 115 | CAAGCUUUCCCAAAUGUCA | 732-750 | 730 |
| 116 | ACUAUAUGAUGCAAUCAAA | 909-927 | 907 |
| 117 | CAAAGAUGUUGGAGACCUU | 1152-1170 | 1150 |
| 118 | GCUGGAUAGAACUUGAUGA | 1262-1280 | 1260 |
| 119 | CCCAAUGAUAAGCAAAUGU | 1449-1467 | 1447 |
| 120 | AGGAGUGCCUGAUUAAUGA | 2072-2090 | 2070 |

[0098] Influenza A virus (A/California/07/2009(H1N1) segment 7 matrix protein 2 (M2) and matrix protein 1 (M1) genes, complete cds (NC_026431.1) (SEQ ID NO:1), viral genome transcript (982 bases):

| | |
|---|---|
| 1 | atgagtcttc taaccgaggt cgaaacgtac gttctttcta |
| | tcatcccgtc aggccccctc |
| 61 | aaagccgaga tcgcgcagag actggaaagt gtctttgcag |
| | gaaagaacac agatcttgag |
| 121 | gctctcatgg aatggctaaa gacaagacca atcttgtcac |
| | ctctgactaa gggaatttta |
| 181 | ggatttgtgt tcacgctcac cgtgcccagt gagcgaggac |
| | tgcagcgtag acgctttgtc |
| 241 | caaaatgccc taaatgggaa tggggacccg aacaacatgg |
| | atagagcagt taaactatac |
| 301 | aagaagctca aaagagaaat aacgttccat ggggccaagg |
| | aggtgtcact aagctattca |
| 361 | actggtgcac ttgccagttg catgggcctc atatacaaca |
| | ggatgggaac agtgaccaca |
| 421 | gaagctgctt ttggtctagt gtgtgccact tgtgaacaga |
| | ttgctgattc acagcatcgg |
| 481 | tctcacagac agatggctac taccaccaat ccactaatca |
| | ggcatgaaaa cagaatggtg |
| 541 | ctggctagca ctacggcaaa ggctatggaa cagatggctg |
| | gatcgagtga acaggcagcg |
| 601 | gaggccatgg aggttgctaa tcagactagg cagatggtac |
| | atgcaatgag aactattggg |
| 661 | actcatccta gctccagtgc tggtctgaaa gatgaccttc |
| | ttgaaaattt gcaggcctac |
| 721 | cagaagcgaa tgggagtgca gatgcagcga ttcaagtgat |
| | cctctcgtca ttgcagcaaa |
| 781 | tatcattggg atcttgcacc tgatattgtg gattactgat |
| | cgtctttttt tcaaatgtat |
| 841 | ttatcgtcgc tttaaatacg gtttgaaaag agggccttct |
| | acggaaggag tgcctgagtc |
| 901 | catgagggaa gaatatcaac aggaacagca gagtgctgtg |
| | gatgttgacg atggtcattt |
| 961 | tgtcaacata gagctagagt aa |

[0099] While the influenza A M genomic segment includes both M1 and M2, as used herein, when referring to inhibiting expression of the influenza A M1 viral genomic segment it refers to an RNAi agent that targets the viral genome transcript anywhere in SEQ ID NO:1.

[0100] Influenza A virus (A/California/07/2009(H1N1)) segment 8 nuclear export protein (NEP) and nonstructural protein 1 (NS1) genes, complete cds (NC_026432.1) (SEQ ID NO:2), viral genome transcript (863 bases):

| | |
|---|---|
| 1 | atggactcca acaccatgtc aagctttcag gtagactgtt |
| | tcctttggca tatccgcaag |
| 61 | cgatttgcag acaatggatt gggtgatgcc ccattccttg |
| | atcggctccg ccgagatcaa |
| 121 | aagtccttaa aaggaagagg caacaccctt ggcctcgata |
| | tcgaaacagc cactcttgtt |
| 181 | gggaaacaaa tcgtggaatg gatcttgaaa gaggaatcca |
| | gcgagacact tagaatgaca |
| 241 | attgcatctg tacctacttc gcgctacctt tctgacatga |
| | ccctcgagga aatgtcacga |
| 301 | gactggttca tgctcatgcc taggcaaaag ataataggcc |
| | ctctttgcgt gcgattggac |
| 361 | caggcgatca tggaaaagaa catagtactg aaagcgaact |
| | tcagtgtaat ctttaaccga |
| 421 | ttagagacct tgatactact aagggctttc actgaggagg |
| | gagcaatagt tggagaaatt |
| 481 | tcaccattac cttctcttcc aggacatact tatgaggatg |
| | tcaaaaatgc agttggggtc |
| 541 | ctcatcggag gacttgaatg gaatggtaac acggttcgag |
| | tctctgaaaa tatacagaga |
| 601 | ttcgcttgga gaaactgtga tgagaatggg agaccttcac |
| | tacctccaga gcagaaatga |
| 661 | aaagtggcga gagcaattgg gacagaaatt tgaggaaata |
| | aggtggttaa ttgaagaaat |
| 721 | gcggcacaga ttgaaagcga cagagaatag tttcgaacaa |
| | ataacattta tgcaagcctt |
| 781 | acaactactg cttgaagtag aacaagagat aagagctttc |
| | tcgtttcagc ttatttaatg |
| 841 | ataaaaaaca cccttgtttc tac |

[0101] Influenza A virus (A/California/07/2009(H1N1)) segment 2 polymerase PB1 (PB1) gene, complete cds; and nonfunctional PB1-F2 protein (PB1-F2) gene, complete sequence (NC_026435.1) (SEQ ID NO:3), viral genome transcript (2274 bases):

| | |
|---|---|
| 1 | atggatgtca atccgactct acttttccta aaaattccag |
| | cgcaaaatgc cataagcacc |
| 61 | acattccctt atactggaga tcctccatac agccatggaa |
| | caggaacagg atacaccatg |
| 121 | gacacagtaa acagaacaca ccaatactca gaaaagggaa |
| | agtggacgac aaacacagag |
| 181 | actggtgcac cccagctcaa cccgattgat ggaccactac |
| | ctgaggataa tgaaccaagt |
| 241 | gggtatgcac aaacagactg tgttctagag gctatggctt |
| | tccttgaaga atcccaccca |
| 301 | ggaatatttg agaattcatg ccttgaaaca atggaagttg |
| | ttcaacaaac aagggtagat |
| 361 | aaactaactc aaggtcgcca gacttatgat tggacattaa |
| | acagaaatca accggcagca |
| 421 | actgcattgg ccaacaccat agaagtcttt agatcgaatg |
| | gcctaacagc taatgagtca |
| 481 | ggaaggctaa tagatttctt aaaggatgta atggaatcaa |
| | tgaacaaaga ggaaatagag |
| 541 | ataacaaccc actttcaaag aaaaaggaga gtaagagaca |
| | acatgaccaa gaagatggtc |
| 601 | acgcaaagaa caatagggaa gaaaaaacaa agactgaata |
| | agagaggcta tctaataaga |
| 661 | gcactgacat taaatacgat gaccaaagat gcagagagag |
| | gcaagttaaa aagaagggct |
| 721 | atcgcaacac ctgggatgca gattagaggt ttcgtatact |
| | ttgttgaaac tttagctagg |
| 781 | agcatttgcg aaaagcttga acagtctggg ctcccagtag |
| | ggggcaatga aaagaaggcc |
| 841 | aaactggcaa atgttgtgag aaagatgatg actaattcac |
| | aagacacaga gatttctttc |
| 901 | acaatcactg gggacaacac taagtggaat gaaaatcaaa |
| | atcctcgaat gttcctggcg |
| 961 | atgattacat atatcaccag aaatcaaccc gagtggttca |
| | gaaacatcct gagcatggca |
| 1021 | cccataatgt tctcaaacaa aatggcaaga ctagggaaag |
| | ggtacatgtt cgagagtaaa |
| 1081 | agaatgaaga ttcgaacaca aataccagca gaaatgctag |
| | caagcattga cctgaagtac |
| 1141 | ttcaatgaat caacaaagaa gaaaattgag aaaataaggc |
| | ctcttctaat agatggcaca |
| 1201 | gcatcactga gtcctgggat gatgatgggc atgttcaaca |
| | tgctaagtac ggtcttggga |
| 1261 | gtctcgatac tgaatcttgg acaaaagaaa tacaccaaga |
| | caatatactg gtgggatggg |
| 1321 | ctccaatcat ccgacgattt tgctctcata gtgaatgcac |
| | caaaccatga gggaatacaa |
| 1381 | gcaggagtgg acagattcta caggacctgc aagttagtgg |
| | gaatcaacat gagcaaaaag |
| 1441 | aagtcctata taaataagac agggacattt gaattcacaa |
| | gcttttttta tcgctatgga |
| 1501 | tttgtggcta attttagcat ggagctaccc agctttggag |
| | tgtctggagt aaatgaatca |
| 1561 | gctgacatga gtattggagt aacagtgata aagaacaaca |
| | tgataaacaa tgaccttgga |
| 1621 | cctgcaacgg cccagatggc tcttcaattg ttcatcaaag |
| | actacagata cacatatagg |
| 1681 | tgccataggg gagacacaca aattcagacg agaagatcat |
| | ttgagttaaa gaagctgtgg |
| 1741 | gatcaaaccc aatcaaaggt agggctatta gtatcagatg |
| | gaggaccaaa cttatacaat |
| 1801 | atacggaatc ttcacattcc tgaagtctgc ttaaaatggg |
| | agctaatgga tgatgattat |
| 1861 | cggggaagac tttgtaatcc cctgaatccc tttgtcagtc |
| | ataaagagat tgattctgta |
| 1921 | aacaatgctg tggtaatgcc agcccatggt ccagccaaaa |
| | gcatggaata tgatgccgtt |
| 1981 | gcaactacac attcctggat tcccaagagg aatcgttcta |
| | ttctcaacac aagccaaagg |
| 2041 | ggaattcttg aggatgaaca gatgtaccag aagtgctgca |
| | atctattcga gaaatttttc |
| 2101 | cctagcagtt catataggag accggttgga atttctagca |
| | tggtggaggc catggtgtct |
| 2161 | agggcccgga ttgatgccag ggtcgacttc gagtctggac |
| | ggatcaagaa agaagagttc |
| 2221 | tctgagatca tgaagatctg ttccaccatt gaagaactca |
| | gacggcaaaa ataa |

[0102] Influenza A virus (A/California/07/2009(H1N1)) segment 1 polymerase PB2 (PB2) gene, complete cds (NC_026438.1) (SEQ ID NO:4), viral genome transcript (2280 bases):

| | |
|---|---|
| 1 | atggagagaa taaaagaact gagagatcta atgtcgcagt |
| | cccgcactcg cgagatactc |
| 61 | actaagacca ctgtggacca tatggccata atcaaaaagt |
| | acacatcagg aaggcaagag |
| 121 | aagaaccccg cactcagaat gaagtggatg atggcaatga |
| | gatacccaat tacagcagac |
| 181 | aagagaataa tggacatgat tccagagagg aatgaacaag |
| | gacaaaccct ctggagcaaa |
| 241 | acaaacgatg ctggatcaga ccgagtgatg gtatcacctc |
| | tggccgtaac atggtggaat |
| 301 | aggaatggcc caacaacaag tacagttcat taccctaagg |
| | tatataaaac ttatttcgaa |
| 361 | aaggtcgaaa ggttgaaaca tggtaccttc ggccctgtcc |
| | acttcagaaa tcaagttaaa |
| 421 | ataaggagga gagttgatac aaaccctggc catgcagatc |
| | tcagtgccaa ggaggcacag |
| 481 | gatgtgatta tggaagttgt tttcccaaat gaagtggggg |
| | caagaatact gacatcagag |
| 541 | tcacagctgg caataacaaa agagaagaaa gaagagctcc |
| | aggattgtaa aattgctccc |
| 601 | ttgatggtgg cgtacatgct agaaagagaa ttggtccgta |
| | aaacaaggtt tctcccagta |
| 661 | gccggcggaa caggcagtgt ttatattgaa gtgttgcact |
| | taacccaagg gacgtgctgg |
| 721 | gagcagatgt acactccagg aggagaagtg agaaatgatg |
| | atgttgacca aagtttgatt |
| 781 | atcgctgcta gaaacatagt aagaagagca gcagtgtcag |
| | cagacccatt agcatctctc |
| 841 | ttggaaatgt gccacagcac acagattgga ggagtaagga |
| | tggtggacat ccttagacag |
| 901 | aatccaactg aggaacaagc cgtagacata tgcaaggcag |
| | caatagggtt gaggattagc |
| 961 | tcatctttca gttttggtgg gttcactttc aaaaggacaa |
| | gcggatcatc agtcaagaaa |
| 1021 | gaagaagaag tgctaacggg caacctccaa acactgaaaa |
| | taagagtaca tgaagggtat |
| 1081 | gaagaattca caatggttgg gagaagagca acagctattc |
| | tcagaaaggc aaccaggaga |
| 1141 | ttgatccagt tgatagtaag cgggagagac gagcagtcaa |
| | ttgctgaggc aataattgtg |
| 1201 | gccatggtat tctcacagga ggattgcatg atcaaggcag |
| | ttaggggcga tctgaacttt |
| 1261 | gtcaataggg caaaccagcg actgaacccc atgcaccaac |
| | tcttgaggca tttccaaaaa |
| 1321 | gatgcaaaag tgcttttcca gaactgggga attgaatcca |
| | tcgacaatgt gatgggaatg |
| 1381 | atcggaatac tgcccgacat gaccccaagc acggagatgt |
| | cgctgagagg gataagagtc |
| 1441 | agcaaaatgg gagtagatga atactccagc acggagagag |
| | tggtagtgag tattgaccga |
| 1501 | tttttaaggg ttagagatca aagagggaac gtactattgt |
| | ctcccgaaga agtcagtgaa |
| 1561 | acgcaaggaa ctgagaagtt gacaataact tattcgtcat |
| | caatgatgtg ggagatcaat |
| 1621 | ggccctgagt cagtgctagt caacacttat caatggataa |
| | tcaggaactg ggaaattgtg |
| 1681 | aaaattcaat ggtcacaaga tcccacaatg ttatacaaca |
| | aaatggaatt tgaaccattt |
| 1741 | cagtctcttg tccctaaggc aaccagaagc cggtacagtg |
| | gattcgtaag gacactgttc |
| 1801 | cagcaaatgc gggatgtgct tgggacattt gacactgtcc |
| | aaataataaa acttctcccc |
| 1861 | tttgctgctg ccccaccaga acagagtagg atgcaatttt |
| | cctcattgac tgtgaatgtg |
| 1921 | agaggatcag ggttgaggat actggtaaga ggcaattctc |
| | cagtattcaa ttacaacaag |
| 1981 | gcaaccaaac gacttacagt tcttggaaag gatgcaggtg |
| | cattgactga agatccagat |
| 2041 | gaaggcacat ctggggtgga gtctgctgtc ctgagaggat |
| | ttctcatttt gggcaaagaa |
| 2101 | gacaagagat atggcccagc attaagcatc aatgaactga |
| | gcaatcttgc aaaaggagag |
| 2161 | aaggctaatg tgctaattgg gcaaggggac gtagtgttgg |
| | taatgaaacg aaaacgggac |
| 2221 | tctagcatac ttactgacag ccagacagcg accaaaagaa |
| | ttcggatggc catcaattag |

[0103] Influenza A virus (A/California/07/2009(H1N1)) segment 5 nucleocapsid protein (NP) gene, complete cds (NC_026436.1) (SEQ ID NO:5), viral genome transcript (1497 bases):

| | |
|---|---|
| 1 | atggcgtctc aaggcaccaa acgatcatat gaacaaatgg |
| | agactggtgg ggagcgccag |
| 61 | gatgccacag aaatcagagc atctgtcgga agaatgattg |
| | gtggaatcgg gagattctac |
| 121 | atccaaatgt gcactgaact caaactcagt gattatgatg |
| | gacgactaat ccagaatagc |
| 181 | ataacaatag agaggatggt gctttctgct tttgatgaga |
| | gaagaaataa atacctagaa |
| 241 | gagcatccca gtgctgggaa ggaccctaag aaaacaggag |
| | gacccatata tagaagagta |
| 301 | gacggaaagt ggatgagaga actcatcctt tatgacaaag |
| | ragaaataag gagagtttgg |
| 361 | cgcctagcaa acaatggcga agatgcaaca gcaggtctta |
| | ctcatatcat gatttggcat |
| 421 | tccaacctga atgatgccac atatcagaga acaagagcgc |
| | ttgttcgcac cggaatggat |
| 481 | cccagaatgt gctctctaat gcaaggttca acacttccca |
| | gaaggtctgg tgccgcaggt |
| 541 | gctgcggtga aaggagttgg aacaatagca atggagttaa |
| | tcagaatgat caaacgtgga |
| 601 | atcaatgacc gaaatttctg gaggggtgaa aatggacgaa |
| | ggacaagggt tgcttatgaa |
| 661 | agaatgtgca atatcctcaa aggaaaattt caaacagctg |
| | cccagagggc aatgatggat |
| 721 | caagtaagag aaagtcgaaa cccaggaaac gctgagattg |
| | aagacctcat tttcctggca |
| 781 | cggtcagcac tcattctgag gggatcagtt gcacataaat |
| | cctgcctgcc tgcttgtgtg |
| 841 | tatgggcttg cagtagcaag tgggcatgac tttgaaaggg |
| | aagggtactc actggtcggg |
| 901 | atagacccat tcaaattact ccaaaacagc caagtggtca |
| | gcctgatgag accaaatgaa |
| 961 | aacccagctc acaagagtca attggtgtgg atggcatgcc |
| | actctgctgc atttgaagat |
| 1021 | ttaagagtat caagtttcat aagaggaaag aaagtgattc |
| | caagaggaaa gctttccaca |
| 1081 | agaggggtcc agattgcttc aaatgagaat gtggaaacca |
| | tggactccaa taccctggaa |
| 1141 | ctgagaagca gatactgggc cataaggacc aggagtggag |
| | gaaataccaa tcaacaaaag |
| 1201 | gcatccgcag gccagatcag tgtgcagcct acattctcag |
| | tgcagcggaa tctccctttt |
| 1261 | gaaagagcaa ccgttatggc agcattcagc gggaacaatg |
| | aaggacggac atccgacatg |
| 1321 | cgaacagaag ttataagaat gatggaaagt gcaaagccag |
| | aagatttgtc cttccagggg |
| 1381 | cggggagtct tcgagctctc ggacgaaaag gcaacgaacc |
| | cgatcgtgcc ttcctttgac |
| 1441 | atgagtaatg aagggtctta tttcttcgga gacaatgcag |
| | aggagtatga cagttga |

[0104] Influenza A virus (A/California/07/2009(H1N1)) segment 3 polymerase PA (PA) gene, complete cds (NC 026437.1) (SEQ ID NO:6), viral genome transcript (2151 bases):

| | |
|---|---|
| 1 | atggaagact ttgtgcgaca atgcttcaat ccaatgatcg |
| | tcgagcttgc ggraaaggca |
| 61 | atgaaagaat atggggaaga tccgaaaatc gaaactaaca |
| | agtttgctgc aatatgcaca |
| 121 | catttggaag tttgtttcat gtattcggat ttccatttca |
| | tcgacgaacg gggtgaatca |
| 181 | ataattgtag aatctggtga cccgaatgca ctattgaagc |
| | accgatttga gataattgaa |
| 241 | ggaagagacc gaatcatggc ctggacagtg gtgaacagta |
| | tatgtaacac aacaggggta |
| 301 | gagaagccta aatttcttcc tgatttgtat gattacaaag |
| | agaaccggtt cattgaaatt |
| 361 | ggagtaacac ggagggaagt ccacatatat tacctagaga |
| | aagccaacaa aataaaatct |
| 421 | gagaagacac acattcacat cttttcattc actggagagg |
| | agatggccac caaagcggac |
| 481 | tacacccttg acgaagagag cagggcaaga atcaaaacta |
| | ggcttttcac tataagacaa |
| 541 | gaaatggcca gtaggagtct atgggattcc tttcgtcagt |
| | ccgaaagagg cgaagagaca |
| 601 | attgaagaaa aatttgagat tacaggaact atgcgcaagc |
| | ttgccgacca aagtctccca |
| 661 | ccgaacttcc ccagccttga aaactttaga gcctatgtag |
| | atggattcga gccgaacggc |
| 721 | tgcattgagg gcaagctttc ccaaatgtca aaagaagtga |
| | acgccaaaat tgaaccattc |
| 781 | ttgaggacga caccacgccc cctcagattg cctgatgggc |
| | ctctttgcca tcagcggtca |
| 841 | aagttcctgc tgatggatgc tctgaaatta agtattgaag |
| | acccgagtca cgagggggag |
| 901 | ggaataccac tatatgatgc aatcaaatgc atgaagacat |
| | tctttggctg gaaagagcct |
| 961 | aacatagtca aaccacatga gaaaggcata aatcccaatt |
| | acctcatggc ttggaagcag |
| 1021 | gtgctagcag agctacagga cattgaaaat gaagagaaga |
| | tcccaaggac aaagaacatg |
| 1081 | aagagaacaa gccaattgaa gtgggcactc ggtgaaaata |
| | tggcaccaga aaaagtagac |
| 1141 | tttgatgact gcaaagatgt tggagacctt aaacagtatg |
| | acagtgatga gccagagccc |
| 1201 | agatctctag caagctgggt ccaaaatgaa ttcaataagg |
| | catgtgaatt gactgattca |
| 1261 | agctggatag aacttgatga aataggagaa gatgttgccc |
| | cgattgaaca tatcgcaagc |
| 1321 | atgaggagga actattttac agcagaagtg tcccactgca |
| | gggctactga atacataatg |
| 1381 | aagggagtgt acataaatac ggccttgctc aatgcatcct |
| | gtgcagccat ggatgacttt |
| 1441 | cagctgatcc caatgataag caaatgtagg accaaagaag |
| | gaagacggaa aacaaacctg |
| 1501 | tatgggttca ttataaaagg aaggtctcat ttgagaaatg |
| | atactgatgt ggtgaacttt |
| 1561 | gtaagtatgg agttctcact cactgacccg agactggagc |
| | cacacaaatg ggaaaaatac |
| 1621 | tgtgttcttg aaataggaga catgctcttg aggactgcga |
| | taggccaagt gtcgaggccc |
| 1681 | atgttcctat atgtgagaac caatggaacc tccaagatca |
| | agatgaaatg gggcatggaa |
| 1741 | atgaggcgct gccttcttca gtctcttcag cagattgaga |
| | gcatgattga ggccgagtct |
| 1801 | tctgtcaaag agaaagacat gaccaaggaa ttctttgaaa |
| | acaaatcgga aacatggcca |
| 1861 | atcggagagt cacccagggg agtggaggaa ggctctattg |
| | ggaaagtgtg caggacctta |
| 1921 | ctggcaaaat ctgtattcaa cagtctatat gcgtctccac |
| | aacttgaggg gttttcggct |
| 1981 | gaatctagaa aattgcttct cattgttcag gcacttaggg |
| | acaacctgga acctggaacc |
| 2041 | ttcgatcttg gggggctata tgaagcaatc gaggagtgcc |
| | tgattaatga tccctgggtt |
| 2101 | ttgcttaatg catcttggtt caactccttc ctcacacatg |
| | cactgaagta g |

[0105] In some embodiments, an IAV RNAi agent includes an antisense strand wherein position 19 of the antisense strand (5′≥3′) is capable of forming abase pair with position 1 of a 19-mer target sequence disclosed in Table 1A, 1B, 1C, 1D, 1E, or 1F. In some embodiments, an IAV RNAi agent includes an antisense strand wherein position 1 of the antisense strand (5′→3′) is capable of forming abase pair with position 19 of a 19-mer target sequence disclosed in Table 1A, 1B, 1C, 1D, 1E, or 1F.

[0106] In some embodiments, an IAV RNAi agent includes an antisense strand wherein position 2 of the antisense strand (5′→3′) is capable of forming a base pair with position 18 of a 19-mer target sequence disclosed in Table 1A, 1B, 1C, 1D, 1E, or 1F. In some embodiments, an IAV RNAi agent includes an antisense strand wherein positions 2 through 18 of the antisense strand (5′→3′) are capable of forming base pairs with each of the respective complementary bases located at positions 18 through 2 of the 19-mer target sequence disclosed in Table 1A, 1B, 1C, 1D, 1E, or 1F.

[0107] For the RNAi agents disclosed herein, the nucleotide at position 1 of the antisense strand (from 5′ end→3′ end) can be perfectly complementary to an influenza A viral genome or can be non-complementary to an influenza A viral genome being targeted. In some embodiments, the nucleotide at position 1 of the antisense strand (from 5′ end→3′ end) is a U, A, or dT. In some embodiments, the nucleotide at position 1 of the antisense strand (from 5′ end→3′ end) forms an A:U or U:A base pair with the sense strand.

[0108] In some embodiments, an IAV RNAi agent antisense strand comprises the sequence of nucleotides (from 5′ end→3′ end) 2-18 or 2-19 of any of the antisense strand sequences in Tables 2A, 2B, 2C, 2D, 2E, 2F, 3A, 3B, 3C, 3D, 3E, or 3F. In some embodiments, an IAV RNAi agent sense strand comprises the sequence of nucleotides (from 5′ end→3′ end) 1-17, 1-18, or 2-18 of any of the sense strand sequences in Table 2A, 2B, 2C, 2D, 2E, 2F, 4A, 4B, 4C, 4D, 4E, 4F, 5A, 5B, 5C, 5D, 5E, 5F, 6A, 6B, 6C, 6D, 6E, or 6F.

[0109] In some embodiments, an IAV RNAi agent is comprised of (i) an antisense strand comprising the sequence of nucleotides (from 5′ end→3′ end) 2-18 or 2-19 of any of the antisense strand sequences in Table 2 or Table 3, and (ii) a sense strand comprising the sequence of nucleotides (from 5′ end→3′ end) 1-17 or 1-18 of any of the sense strand sequences in Table 2A, 2B, 2C, 2D, 2E, 2F, 4A, 4B, 4C, 4D, 4E, 4F, 5A, 5B, 5C, 5D, 5E, 5F, 6A, 6B, 6C, 6D, 6E, or 6F.

[0110] In some embodiments, the IAV RNAi agents include core 19-mer nucleotide sequences shown in the following Tables 2A, 2B, 2C, 2D, 2E, and 2F.

TABLE 2A
IAV RNAi agent (targeting M1) Antisense Strand and Sense Strand Core Stretch Base Sequences
(N = any nucleobase)

| | | | | Corresponding | |
|---|---|---|---|---|---|
| | Antisense Strand Base Sequence | | Sense Strand Base Sequence | Positions of | Targeted |
| SEQ | (5′ → 3′) | SEQ | (5′ → 3′) | Identified | Viral |
| ID | (Shown as an Unmodified | ID | (Shown as an Unmodified | Sequence on | Genome |
| NO:. | Nucleotide Sequence) | NO:. | Nucleotide Sequence) | SEQ ID NO: 1 | Position |
| 121 | GUACGUUUCGACCUCGGUU | 638 | AACCGAGGUCGAAACGUAC | 12-30 | 10 |
| 122 | AUACGUUUCGACCUCGGUU | 639 | AACCGAGGUCGAAACGUAU | 12-30 | 10 |
| 123 | UUACGUUUCGACCUCGGUU | 640 | AACCGAGGUCGAAACGUAA | 12-30 | 10 |
| 124 | NUACGUUUCGACCUCGGUU | 641 | AACCGAGGUCGAAACGUAN | 12-30 | 10 |
| 125 | NUACGUUUCGACCUCGGUN | 642 | NACCGAGGUCGAAACGUAN | 12-30 | 10 |
| 126 | GAUGAUAGAAAGAACGUAC | 643 | GUACGUUCUUUCUAUCAUC | 27-45 | 25 |
| 127 | AAUGAUAGAAAGAACGUAC | 644 | GUACGUUCUUUCUAUCAUU | 27-45 | 25 |
| 128 | UAUGAUAGAAAGAACGUAC | 645 | GUACGUUCUUUCUAUCAUA | 27-45 | 25 |
| 129 | NAUGAUAGAAAGAACGUAC | 646 | GUACGUUCUUUCUAUCAUN | 27-45 | 25 |
| 130 | NAUGAUAGAAAGAACGUAN | 647 | NUACGUUCUUUCUAUCAUN | 27-45 | 25 |
| 131 | GUGACAAGAUUGGUCUUGU | 648 | ACAAGACCAAUCUUGUCAC | 142-160 | 140 |
| 132 | AUGACAAGAUUGGUCUUGU | 649 | ACAAGACCAAUCUUGUCAU | 142-160 | 140 |
| 133 | UUGACAAGAUUGGUCUUGU | 650 | ACAAGACCAAUCUUGUCAA | 142-160 | 140 |
| 134 | NUGACAAGAUUGGUCUUGU | 651 | ACAAGACCAAUCUUGUCAN | 142-160 | 140 |
| 135 | NUGACAAGAUUGGUCUUGN | 652 | NCAAGACCAAUCUUGUCAN | 142-160 | 140 |
| 136 | AGUCAGAGGUGACAAGAUU | 653 | AAUCUUGUCACCUCUGACU | 150-168 | 148 |
| 137 | UGUCAGAGGUGACAAGAUU | 654 | AAUCUUGUCACCUCUGACA | 150-168 | 148 |
| 138 | NGUCAGAGGUGACAAGAUU | 655 | AAUCUUGUCACCUCUGACN | 150-168 | 148 |
| 139 | NGUCAGAGGUGACAAGAUN | 656 | NAUCUUGUCACCUCUGACN | 150-168 | 148 |
| 140 | UUAGUCAGAGGUGACAAGA | 657 | UCUUGUCACCUCUGACUAA | 152-170 | 150 |
| 141 | AUAGUCAGAGGUGACAAGA | 658 | UCUUGUCACCUCUGACUAU | 152-170 | 150 |
| 142 | NUAGUCAGAGGUGACAAGA | 659 | UCUUGUCACCUCUGACUAN | 152-170 | 150 |
| 143 | NUAGUCAGAGGUGACAAGN | 660 | NCUUGUCACCUCUGACUAN | 152-170 | 150 |
| 144 | GCUCUAUCCAUGUUGUUCG | 661 | CGAACAACAUGGAUAGAGC | 269-287 | 267 |
| 145 | ACUCUAUCCAUGUUGUUCG | 662 | CGAACAACAUGGAUAGAGU | 269-287 | 267 |
| 146 | UCUCUAUCCAUGUUGUUCG | 663 | CGAACAACAUGGAUAGAGA | 269-287 | 267 |
| 147 | NCUCUAUCCAUGUUGUUCG | 664 | CGAACAACAUGGAUAGAGN | 269-287 | 267 |
| 148 | NCUCUAUCCAUGUUGUUCN | 665 | NGAACAACAUGGAUAGAGN | 269-287 | 267 |
| 149 | AACUGCUCUAUCCAUGUUG | 666 | CAACAUGGAUAGAGCAGUU | 273-291 | 271 |
| 150 | UACUGCUCUAUCCAUGUUG | 667 | CAACAUGGAUAGAGCAGUA | 273-291 | 271 |
| 151 | NACUGCUCUAUCCAUGUUG | 668 | CAACAUGGAUAGAGCAGUN | 273-291 | 271 |
| 152 | NACUGCUCUAUCCAUGUUN | 669 | NAACAUGGAUAGAGCAGUN | 273-291 | 271 |
| 153 | CAGUUGAAUAGCUUAGUGA | 670 | UCACUAAGCUAUUCAACUG | 346-364 | 344 |
| 154 | AAGUUGAAUAGCUUAGUGA | 671 | UCACUAAGCUAUUCAACUU | 346-364 | 344 |
| 155 | UAGUUGAAUAGCUUAGUGA | 672 | UCACUAAGCUAUUCAACUA | 346-364 | 344 |
| 156 | NAGUUGAAUAGCUUAGUGA | 673 | UCACUAAGCUAUUCAACUN | 346-364 | 344 |
| 157 | NAGUUGAAUAGCUUAGUGN | 674 | NCACUAAGCUAUUCAACUN | 346-364 | 344 |
| 158 | CUGGCAAGUGCACCAGUUG | 675 | CAACUGGUGCACUUGCCAG | 359-377 | 357 |
| 159 | AUGGCAAGUGCACCAGUUG | 676 | CAACUGGUGCACUUGCCAU | 359-377 | 357 |
| 160 | UUGGCAAGUGCACCAGUUG | 677 | CAACUGGUGCACUUGCCAA | 359-377 | 357 |
| 161 | NUGGCAAGUGCACCAGUUG | 678 | CAACUGGUGCACUUGCCAN | 359-377 | 357 |
| 162 | NUGGCAAGUGCACCAGUUN | 679 | NAACUGGUGCACUUGCCAN | 359-377 | 357 |
| 163 | AAAGCAGCUUCUGUGGUCA | 680 | UGACCACAGAAGCUGCUUU | 413-431 | 411 |
| 164 | UAAGCAGCUUCUGUGGUCA | 681 | UGACCACAGAAGCUGCUUA | 413-431 | 411 |
| 165 | NAAGCAGCUUCUGUGGUCA | 682 | UGACCACAGAAGCUGCUUN | 413-431 | 411 |
| 166 | NAAGCAGCUUCUGUGGUCN | 683 | NGACCACAGAAGCUGCUUN | 413-431 | 411 |
| 167 | GCCUGAUUAGUGGAUUGGU | 684 | ACCAAUCCACUAAUCAGGC | 505-523 | 503 |
| 168 | ACCUGAUUAGUGGAUUGGU | 685 | ACCAAUCCACUAAUCAGGU | 505-523 | 503 |
| 169 | UCCUGAUUAGUGGAUUGGU | 686 | ACCAAUCCACUAAUCAGGA | 505-523 | 503 |
| 170 | NCCUGAUUAGUGGAUUGGU | 687 | ACCAAUCCACUAAUCAGGN | 505-523 | 503 |
| 171 | NCCUGAUUAGUGGAUUGGN | 688 | NCCAAUCCACUAAUCAGGN | 505-523 | 503 |
| 172 | CUAGGAUGAGUCCCAAUAG | 689 | CUAUUGGGACUCAUCCUAG | 653-671 | 651 |
| 173 | AUAGGAUGAGUCCCAAUAG | 690 | CUAUUGGGACUCAUCCUAU | 653-671 | 651 |
| 174 | UUAGGAUGAGUCCCAAUAG | 691 | CUAUUGGGACUCAUCCUAA | 653-671 | 651 |
| 175 | NUAGGAUGAGUCCCAAUAG | 692 | CUAUUGGGACUCAUCCUAN | 653-671 | 651 |
| 176 | NUAGGAUGAGUCCCAAUAN | 693 | NUAUUGGGACUCAUCCUAN | 653-671 | 651 |
| 177 | GACAAAAUGACCAUCGUCA | 694 | UGACGAUGGUCAUUUUGUC | 946-964 | 944 |
| 178 | AACAAAAUGACCAUCGUCA | 695 | UGACGAUGGUCAUUUUGUU | 946-964 | 944 |
| 179 | UACAAAAUGACCAUCGUCA | 696 | UGACGAUGGUCAUUUUGUA | 946-964 | 944 |
| 180 | NACAAAAUGACCAUCGUCA | 697 | UGACGAUGGUCAUUUUGUN | 946-964 | 944 |
| 181 | NACAAAAUGACCAUCGUCN | 698 | NGACGAUGGUCAUUUUGUN | 946-964 | 944 |
| 182 | UGACAAAAUGACCAUCGUC | 699 | GACGAUGGUCAUUUUGUCA | 947-965 | 945 |
| 183 | AGACAAAAUGACCAUCGUC | 700 | GACGAUGGUCAUUUUGUCU | 947-965 | 945 |
| 184 | NGACAAAAUGACCAUCGUC | 701 | GACGAUGGUCAUUUUGUCN | 947-965 | 945 |
| 185 | NGACAAAAUGACCAUCGUN | 702 | NACGAUGGUCAUUUUGUCN | 947-965 | 945 |

TABLE 2B
IAV RNAi agent (targeting NS1) Antisense Strand and Sense Strand Core Stretch Base Sequences
(N = any nucleobase)

| | | | | Corresponding | |
|---|---|---|---|---|---|
| | Antisense Strand Base Sequence | | Sense Strand Base Sequence | Positions of | Targeted |
| SEQ | (5′ → 3′) | SEQ | (5′ → 3′) | Identified | Viral |
| ID | (Shown as an Unmodified | ID | (Shown as an Unmodified | Sequence on | Genome |
| NO:. | Nucleotide Sequence) | NO:. | Nucleotide Sequence) | SEQ ID NO: 2 | Position |
| 186 | GAUCAAGGAAUGGGGCAUC | 703 | GAUGCCCCAUUCCUUGAUC | 85-103 | 83 |
| 187 | AAUCAAGGAAUGGGGCAUC | 704 | GAUGCCCCAUUCCUUGAUU | 85-103 | 83 |
| 188 | UAUCAAGGAAUGGGGCAUC | 705 | GAUGCCCCAUUCCUUGAUA | 85-103 | 83 |
| 189 | NAUCAAGGAAUGGGGCAUC | 706 | GAUGCCCCAUUCCUUGAUN | 85-103 | 83 |
| 190 | NAUCAAGGAAUGGGGCAUN | 707 | NAUGCCCCAUUCCUUGAUN | 85-103 | 83 |
| 191 | CGAUCAAGGAAUGGGGCAU | 708 | AUGCCCCAUUCCUUGAUCG | 86-104 | 84 |
| 192 | AGAUCAAGGAAUGGGGCAU | 709 | AUGCCCCAUUCCUUGAUCU | 86-104 | 84 |
| 193 | UGAUCAAGGAAUGGGGCAU | 710 | AUGCCCCAUUCCUUGAUCA | 86-104 | 84 |
| 194 | NGAUCAAGGAAUGGGGCAU | 711 | AUGCCCCAUUCCUUGAUCN | 86-104 | 84 |
| 195 | NGAUCAAGGAAUGGGGCAN | 712 | NUGCCCCAUUCCUUGAUCN | 86-104 | 84 |
| 196 | CCGAUCAAGGAAUGGGGCA | 713 | UGCCCCAUUCCUUGAUCGG | 87-105 | 85 |
| 197 | ACGAUCAAGGAAUGGGGCA | 714 | UGCCCCAUUCCUUGAUCGU | 87-105 | 85 |
| 198 | UCGAUCAAGGAAUGGGGCA | 715 | UGCCCCAUUCCUUGAUCGA | 87-105 | 85 |
| 199 | NCGAUCAAGGAAUGGGGCA | 716 | UGCCCCAUUCCUUGAUCGN | 87-105 | 85 |
| 200 | NCGAUCAAGGAAUGGGGCN | 717 | NGCCCCAUUCCUUGAUCGN | 87-105 | 85 |
| 201 | CAACAAGAGUGGCUGUUUC | 718 | GAAACAGCCACUCUUGUUG | 163-181 | 161 |
| 202 | AAACAAGAGUGGCUGUUUC | 719 | GAAACAGCCACUCUUGUUU | 163-181 | 161 |
| 203 | UAACAAGAGUGGCUGUUUC | 720 | GAAACAGCCACUCUUGUUA | 163-181 | 161 |
| 204 | NAACAAGAGUGGCUGUUUC | 721 | GAAACAGCCACUCUUGUUN | 163-181 | 161 |
| 205 | NAACAAGAGUGGCUGUUUN | 722 | NAAACAGCCACUCUUGUUN | 163-181 | 161 |
| 206 | UCAAGAUCCAUUCCACGAU | 723 | AUCGUGGAAUGGAUCUUGA | 190-208 | 188 |
| 207 | ACAAGAUCCAUUCCACGAU | 724 | AUCGUGGAAUGGAUCUUGU | 190-208 | 188 |
| 208 | NCAAGAUCCAUUCCACGAU | 725 | AUCGUGGAAUGGAUCUUGN | 190-208 | 188 |
| 209 | NCAAGAUCCAUUCCACGAN | 726 | NUCGUGGAAUGGAUCUUGN | 190-208 | 188 |
| 210 | CUGGAUUCCUCUUUCAAGA | 727 | UCUUGAAAGAGGAAUCCAG | 203-221 | 201 |
| 211 | AUGGAUUCCUCUUUCAAGA | 728 | UCUUGAAAGAGGAAUCCAU | 203-221 | 201 |
| 212 | UUGGAUUCCUCUUUCAAGA | 729 | UCUUGAAAGAGGAAUCCAA | 203-221 | 201 |
| 213 | NUGGAUUCCUCUUUCAAGA | 730 | UCUUGAAAGAGGAAUCCAN | 203-221 | 201 |
| 214 | NUGGAUUCCUCUUUCAAGN | 731 | NCUUGAAAGAGGAAUCCAN | 203-221 | 201 |
| 215 | AGGUACAGAUGCAAUUGUC | 732 | GACAAUUGCAUCUGUACCU | 237-255 | 235 |
| 216 | UGGUACAGAUGCAAUUGUC | 733 | GACAAUUGCAUCUGUACCA | 237-255 | 235 |
| 217 | NGGUACAGAUGCAAUUGUC | 734 | GACAAUUGCAUCUGUACCN | 237-255 | 235 |
| 218 | NGGUACAGAUGCAAUUGUN | 735 | NACAAUUGCAUCUGUACCN | 237-255 | 235 |
| 219 | GCGAAGUAGGUACAGAUGC | 736 | GCAUCUGUACCUACUUCGC | 244-262 | 242 |
| 220 | ACGAAGUAGGUACAGAUGC | 737 | GCAUCUGUACCUACUUCGU | 244-262 | 242 |
| 221 | UCGAAGUAGGUACAGAUGC | 738 | GCAUCUGUACCUACUUCGA | 244-262 | 242 |
| 222 | NCGAAGUAGGUACAGAUGC | 739 | GCAUCUGUACCUACUUCGN | 244-262 | 242 |
| 223 | NCGAAGUAGGUACAGAUGN | 740 | NCAUCUGUACCUACUUCGN | 244-262 | 242 |
| 224 | AUGAGCAUGAACCAGUCUC | 741 | GAGACUGGUUCAUGCUCAU | 299-317 | 297 |
| 225 | UUGAGCAUGAACCAGUCUC | 742 | GAGACUGGUUCAUGCUCAA | 299-317 | 297 |
| 226 | NUGAGCAUGAACCAGUCUC | 743 | GAGACUGGUUCAUGCUCAN | 299-317 | 297 |
| 227 | NUGAGCAUGAACCAGUCUN | 744 | NAGACUGGUUCAUGCUCAN | 299-317 | 297 |
| 228 | GCAUGAGCAUGAACCAGUC | 745 | GACUGGUUCAUGCUCAUGC | 301-319 | 299 |
| 229 | ACAUGAGCAUGAACCAGUC | 746 | GACUGGUUCAUGCUCAUGU | 301-319 | 299 |
| 230 | UCAUGAGCAUGAACCAGUC | 747 | GACUGGUUCAUGCUCAUGA | 301-319 | 299 |
| 231 | NCAUGAGCAUGAACCAGUC | 748 | GACUGGUUCAUGCUCAUGN | 301-319 | 299 |
| 232 | NCAUGAGCAUGAACCAGUN | 749 | NACUGGUUCAUGCUCAUGN | 301-319 | 299 |
| 233 | ACACUGAAGUUCGCUUUCA | 750 | UGAAAGCGAACUUCAGUGU | 389-407 | 387 |
| 234 | UCACUGAAGUUCGCUUUCA | 751 | UGAAAGCGAACUUCAGUGA | 389-407 | 387 |
| 235 | NCACUGAAGUUCGCUUUCA | 752 | UGAAAGCGAACUUCAGUGN | 389-407 | 387 |
| 236 | NCACUGAAGUUCGCUUUCN | 753 | NGAAAGCGAACUUCAGUGN | 389-407 | 387 |
| 237 | AAAGAUUACACUGAAGUUC | 754 | GAACUUCAGUGUAAUCUUU | 396-414 | 394 |
| 238 | UAAGAUUACACUGAAGUUC | 755 | GAACUUCAGUGUAAUCUUA | 396-414 | 394 |
| 239 | NAAGAUUACACUGAAGUUC | 756 | GAACUUCAGUGUAAUCUUN | 396-414 | 394 |
| 240 | NAAGAUUACACUGAAGUUN | 757 | NAACUUCAGUGUAAUCUUN | 396-414 | 394 |
| 241 | GUAUCAAGGUCUCUAAUCG | 758 | CGAUUAGAGACCUUGAUAC | 418-436 | 416 |
| 242 | AUAUCAAGGUCUCUAAUCG | 759 | CGAUUAGAGACCUUGAUAU | 418-436 | 416 |
| 243 | UUAUCAAGGUCUCUAAUCG | 760 | CGAUUAGAGACCUUGAUAA | 418-436 | 416 |
| 244 | NUAUCAAGGUCUCUAAUCG | 761 | CGAUUAGAGACCUUGAUAN | 418-436 | 416 |
| 245 | NUAUCAAGGUCUCUAAUCN | 762 | NGAUUAGAGACCUUGAUAN | 418-436 | 416 |
| 246 | AGUGAAAGCCCUUAGUAGU | 763 | ACUACUAAGGGCUUUCACU | 435-453 | 433 |
| 247 | UGUGAAAGCCCUUAGUAGU | 764 | ACUACUAAGGGCUUUCACA | 435-453 | 433 |
| 248 | NGUGAAAGCCCUUAGUAGU | 765 | ACUACUAAGGGCUUUCACN | 435-453 | 433 |
| 249 | NGUGAAAGCCCUUAGUAGN | 766 | NCUACUAAGGGCUUUCACN | 435-453 | 433 |
| 250 | CAGUGAAAGCCCUUAGUAG | 767 | CUACUAAGGGCUUUCACUG | 436-454 | 434 |
| 251 | AAGUGAAAGCCCUUAGUAG | 768 | CUACUAAGGGCUUUCACUU | 436-454 | 434 |
| 252 | UAGUGAAAGCCCUUAGUAG | 769 | CUACUAAGGGCUUUCACUA | 436-454 | 434 |
| 253 | NAGUGAAAGCCCUUAGUAG | 770 | CUACUAAGGGCUUUCACUN | 436-454 | 434 |
| 254 | NAGUGAAAGCCCUUAGUAN | 771 | NUACUAAGGGCUUUCACUN | 436-454 | 434 |
| 255 | AAGUAUGUCCUGGAAGAGA | 772 | UCUCUUCCAGGACAUACUU | 493-511 | 491 |
| 256 | UAGUAUGUCCUGGAAGAGA | 773 | UCUCUUCCAGGACAUACUA | 493-511 | 491 |
| 257 | NAGUAUGUCCUGGAAGAGA | 774 | UCUCUUCCAGGACAUACUN | 493-511 | 491 |
| 258 | NAGUAUGUCCUGGAAGAGN | 775 | NCUCUUCCAGGACAUACUN | 493-511 | 491 |
| 259 | UGCAUUUUUGACAUCCUCA | 776 | UGAGGAUGUCAAAAAUGCA | 513-531 | 511 |
| 260 | AGCAUUUUUGACAUCCUCA | 777 | UGAGGAUGUCAAAAAUGCU | 513-531 | 511 |
| 261 | NGCAUUUUUGACAUCCUCA | 778 | UGAGGAUGUCAAAAAUGCN | 513-531 | 511 |
| 262 | NGCAUUUUUGACAUCCUCN | 779 | NGAGGAUGUCAAAAAUGCN | 513-531 | 511 |
| 263 | CCCAACUGCAUUUUUGACA | 780 | UGUCAAAAAUGCAGUUGGG | 519-537 | 517 |
| 264 | ACCAACUGCAUUUUUGACA | 781 | UGUCAAAAAUGCAGUUGGU | 519-537 | 517 |
| 265 | UCCAACUGCAUUUUUGACA | 782 | UGUCAAAAAUGCAGUUGGA | 519-537 | 517 |
| 266 | NCCAACUGCAUUUUUGACA | 783 | UGUCAAAAAUGCAGUUGGN | 519-537 | 517 |
| 267 | NCCAACUGCAUUUUUGACN | 784 | NGUCAAAAAUGCAGUUGGN | 519-537 | 517 |
| 268 | GAUGAGGACCCCAACUGCA | 785 | UGCAGUUGGGGUCCUCAUC | 528-546 | 526 |
| 269 | AAUGAGGACCCCAACUGCA | 786 | UGCAGUUGGGGUCCUCAUU | 528-546 | 526 |
| 270 | UAUGAGGACCCCAACUGCA | 787 | UGCAGUUGGGGUCCUCAUA | 528-546 | 526 |
| 271 | NAUGAGGACCCCAACUGCA | 788 | UGCAGUUGGGGUCCUCAUN | 528-546 | 526 |
| 272 | NAUGAGGACCCCAACUGCN | 789 | NGCAGUUGGGGUCCUCAUN | 528-546 | 526 |
| 273 | CCAUUCAAGUCCUCCGAUG | 790 | CAUCGGAGGACUUGAAUGG | 543-561 | 541 |
| 274 | ACAUUCAAGUCCUCCGAUG | 791 | CAUCGGAGGACUUGAAUGU | 543-561 | 541 |
| 275 | UCAUUCAAGUCCUCCGAUG | 792 | CAUCGGAGGACUUGAAUGA | 543-561 | 541 |
| 276 | NCAUUCAAGUCCUCCGAUG | 793 | CAUCGGAGGACUUGAAUGN | 543-561 | 541 |
| 277 | NCAUUCAAGUCCUCCGAUN | 794 | NAUCGGAGGACUUGAAUGN | 543-561 | 541 |
| 278 | UCCAUUCAAGUCCUCCGAU | 795 | AUCGGAGGACUUGAAUGGA | 544-562 | 542 |
| 279 | ACCAUUCAAGUCCUCCGAU | 796 | AUCGGAGGACUUGAAUGGU | 544-562 | 542 |
| 280 | NCCAUUCAAGUCCUCCGAU | 797 | AUCGGAGGACUUGAAUGGN | 544-562 | 542 |
| 281 | NCCAUUCAAGUCCUCCGAN | 798 | NUCGGAGGACUUGAAUGGN | 544-562 | 542 |
| 282 | UUCCAUUCAAGUCCUCCGA | 799 | UCGGAGGACUUGAAUGGAA | 545-563 | 543 |
| 283 | AUCCAUUCAAGUCCUCCGA | 800 | UCGGAGGACUUGAAUGGAU | 545-563 | 543 |
| 284 | NUCCAUUCAAGUCCUCCGA | 801 | UCGGAGGACUUGAAUGGAN | 545-563 | 543 |
| 285 | NUCCAUUCAAGUCCUCCGN | 802 | NCGGAGGACUUGAAUGGAN | 545-563 | 543 |
| 286 | CAUUCCAUUCAAGUCCUCC | 803 | GGAGGACUUGAAUGGAAUG | 547-565 | 545 |
| 287 | AAUUCCAUUCAAGUCCUCC | 804 | GGAGGACUUGAAUGGAAUU | 547-565 | 545 |
| 288 | UAUUCCAUUCAAGUCCUCC | 805 | GGAGGACUUGAAUGGAAUA | 547-565 | 545 |
| 289 | NAUUCCAUUCAAGUCCUCC | 806 | GGAGGACUUGAAUGGAAUN | 547-565 | 545 |
| 290 | NAUUCCAUUCAAGUCCUCN | 807 | NGAGGACUUGAAUGGAAUN | 547-565 | 545 |
| 291 | CCAUUCCAUUCAAGUCCUC | 808 | GAGGACUUGAAUGGAAUGG | 548-566 | 546 |
| 292 | ACAUUCCAUUCAAGUCCUC | 809 | GAGGACUUGAAUGGAAUGU | 548-566 | 546 |
| 293 | UCAUUCCAUUCAAGUCCUC | 810 | GAGGACUUGAAUGGAAUGA | 548-566 | 546 |
| 294 | NCAUUCCAUUCAAGUCCUC | 811 | GAGGACUUGAAUGGAAUGN | 548-566 | 546 |
| 295 | NCAUUCCAUUCAAGUCCUN | 812 | NAGGACUUGAAUGGAAUGN | 548-566 | 546 |
| 296 | GUGUUACCAUUCCAUUCAA | 813 | UUGAAUGGAAUGGUAACAC | 554-572 | 552 |
| 297 | AUGUUACCAUUCCAUUCAA | 814 | UUGAAUGGAAUGGUAACAU | 554-572 | 552 |
| 298 | UUGUUACCAUUCCAUUCAA | 815 | UUGAAUGGAAUGGUAACAA | 554-572 | 552 |
| 299 | NUGUUACCAUUCCAUUCAA | 816 | UUGAAUGGAAUGGUAACAN | 554-572 | 552 |
| 300 | NUGUUACCAUUCCAUUCAN | 817 | UUGAAUGGAAUGGUAACAN | 554-572 | 552 |
| 301 | ACUCGAACCGUGUUACCAU | 818 | AUGGUAACACGGUUCGAGU | 563-581 | 561 |
| 302 | UCUCGAACCGUGUUACCAU | 819 | AUGGUAACACGGUUCGAGA | 563-581 | 561 |
| 303 | NCUCGAACCGUGUUACCAU | 820 | AUGGUAACACGGUUCGAGN | 563-581 | 561 |
| 304 | NCUCGAACCGUGUUACCAN | 821 | NUGGUAACACGGUUCGAGN | 563-581 | 561 |
| 305 | GAGACUCGAACCGUGUUAC | 822 | GUAACACGGUUCGAGUCUC | 566-584 | 564 |
| 306 | AAGACUCGAACCGUGUUAC | 823 | GUAACACGGUUCGAGUCUU | 566-584 | 564 |
| 307 | UAGACUCGAACCGUGUUAC | 824 | GUAACACGGUUCGAGUCUA | 566-584 | 564 |
| 308 | NAGACUCGAACCGUGUUAC | 825 | GUAACACGGUUCGAGUCUN | 566-584 | 564 |
| 309 | NAGACUCGAACCGUGUUAN | 826 | NUAACACGGUUCGAGUCUN | 566-584 | 564 |
| 310 | CUCCAAGCGAAUCUCUGUA | 827 | UACAGAGAUUCGCUUGGAG | 593-611 | 591 |
| 311 | AUCCAAGCGAAUCUCUGUA | 828 | UACAGAGAUUCGCUUGGAU | 593-611 | 591 |
| 312 | UUCCAAGCGAAUCUCUGUA | 829 | UACAGAGAUUCGCUUGGAA | 593-611 | 591 |
| 313 | NUCCAAGCGAAUCUCUGUA | 830 | UACAGAGAUUCGCUUGGAN | 593-611 | 591 |
| 314 | NUCCAAGCGAAUCUCUGUN | 831 | NACAGAGAUUCGCUUGGAN | 593-611 | 591 |
| 315 | AAGGUCUCCCAUUCUCAUC | 832 | GAUGAGAAUGGGAGACCUU | 619-637 | 617 |
| 316 | UAGGUCUCCCAUUCUCAUC | 833 | GAUGAGAAUGGGAGACCUA | 619-637 | 617 |
| 317 | NAGGUCUCCCAUUCUCAUC | 834 | GAUGAGAAUGGGAGACCUN | 619-637 | 617 |
| 318 | NAGGUCUCCCAUUCUCAUN | 835 | NAUGAGAAUGGGAGACCUN | 619-637 | 617 |
| 319 | UAGUGAAGGUCUCCCAUUC | 836 | GAAUGGGAGACCUUCACUA | 624-642 | 622 |
| 320 | AAGUGAAGGUCUCCCAUUC | 837 | GAAUGGGAGACCUUCACUU | 624-642 | 622 |
| 321 | NAGUGAAGGUCUCCCAUUC | 838 | GAAUGGGAGACCUUCACUN | 624-642 | 622 |
| 322 | NAGUGAAGGUCUCCCAUUN | 839 | NAAUGGGAGACCUUCACUN | 624-642 | 622 |
| 323 | UUCGAAACUAUUCUCUGUC | 840 | GACAGAGAAUAGUUUCGAA | 739-757 | 737 |
| 324 | AUCGAAACUAUUCUCUGUC | 841 | GACAGAGAAUAGUUUCGAU | 739-757 | 737 |
| 325 | NUCGAAACUAUUCUCUGUC | 842 | GACAGAGAAUAGUUUCGAN | 739-757 | 737 |
| 326 | NUCGAAACUAUUCUCUGUN | 843 | NACAGAGAAUAGUUUCGAN | 739-757 | 737 |
| 327 | UAGUUGUAAGGCUUGCAUA | 844 | UAUGCAAGCCUUACAACUA | 769-787 | 767 |
| 328 | AAGUUGUAAGGCUUGCAUA | 845 | UAUGCAAGCCUUACAACUU | 769-787 | 767 |
| 329 | NAGUUGUAAGGCUUGCAUA | 846 | UAUGCAAGCCUUACAACUN | 769-787 | 767 |
| 330 | NAGUUGUAAGGCUUGCAUN | 847 | NAUGCAAGCCUUACAACUN | 769-787 | 767 |
| 331 | AACGAGAAAGCUCUUAUCU | 848 | AGAUAAGAGCUUUCUCGUU | 807-825 | 805 |
| 332 | UACGAGAAAGCUCUUAUCU | 849 | AGAUAAGAGCUUUCUCGUA | 807-825 | 805 |
| 333 | NACGAGAAAGCUCUUAUCU | 850 | AGAUAAGAGCUUUCUCGUN | 807-825 | 805 |
| 334 | NACGAGAAAGCUCUUAUCN | 851 | NGAUAAGAGCUUUCUCGUN | 807-825 | 805 |
| 335 | AUAAGCUGAAACGAGAAAG | 852 | CUUUCUCGUUUCAGCUUAU | 816-834 | 814 |
| 336 | UUAAGCUGAAACGAGAAAG | 853 | CUUUCUCGUUUCAGCUUAA | 816-834 | 814 |
| 337 | NUAAGCUGAAACGAGAAAG | 854 | CUUUCUCGUUUCAGCUUAN | 816-834 | 814 |
| 338 | NUAAGCUGAAACGAGAAAN | 855 | NUUUCUCGUUUCAGCUUAN | 816-834 | 814 |

TABLE 2C
IAV RNAi agent (targeting PB1) Antisense Strand and Sense Strand Core Stretch Base Sequences
(N = any nucleobase)

| | | | | Corresponding | |
|---|---|---|---|---|---|
| | Antisense Strand Base Sequence | | Sense Strand Base Sequence | Positions of | Targeted |
| SEQ | (5′ → 3′) | SEQ | (5′ → 3′) | Identified | Viral |
| ID | (Shown as an Unmodified | ID | (Shown as an Unmodified | Sequence on | Genome |
| NO:. | Nucleotide Sequence) | NO:. | Nucleotide Sequence) | SEQ ID NO: 3 | Position |
| 339 | GGAAUGUGGUGCUUAUGGC | 856 | GCCAUAAGCACCACAUUCC | 49-67 | 47 |
| 340 | AGAAUGUGGUGCUUAUGGC | 857 | GCCAUAAGCACCACAUUCU | 49-67 | 47 |
| 341 | UGAAUGUGGUGCUUAUGGC | 858 | GCCAUAAGCACCACAUUCA | 49-67 | 47 |
| 342 | NGAAUGUGGUGCUUAUGGC | 859 | GCCAUAAGCACCACAUUCN | 49-67 | 47 |
| 343 | NGAAUGUGGUGCUUAUGGN | 860 | NCCAUAAGCACCACAUUCN | 49-67 | 47 |
| 344 | CAGUAUAAGGGAAUGUGGU | 861 | ACCACAUUCCCUUAUACUG | 58-76 | 56 |
| 345 | AAGUAUAAGGGAAUGUGGU | 862 | ACCACAUUCCCUUAUACUU | 58-76 | 56 |
| 346 | UAGUAUAAGGGAAUGUGGU | 863 | ACCACAUUCCCUUAUACUA | 58-76 | 56 |
| 347 | NAGUAUAAGGGAAUGUGGU | 864 | ACCACAUUCCCUUAUACUN | 58-76 | 56 |
| 348 | NAGUAUAAGGGAAUGUGGN | 865 | NCCACAUUCCCUUAUACUN | 58-76 | 56 |
| 349 | GAGUAUUGGUGUGUUCUGU | 866 | ACAGAACACACCAAUACUC | 131-149 | 129 |
| 350 | AAGUAUUGGUGUGUUCUGU | 867 | ACAGAACACACCAAUACUU | 131-149 | 129 |
| 351 | UAGUAUUGGUGUGUUCUGU | 868 | ACAGAACACACCAAUACUA | 131-149 | 129 |
| 352 | NAGUAUUGGUGUGUUCUGU | 869 | ACAGAACACACCAAUACUN | 131-149 | 129 |
| 353 | NAGUAUUGGUGUGUUCUGN | 870 | NCAGAACACACCAAUACUN | 131-149 | 129 |
| 354 | UUCCAUUGUUUCAAGGCAU | 871 | AUGCCUUGAAACAAUGGAA | 318-336 | 316 |
| 355 | AUCCAUUGUUUCAAGGCAU | 872 | AUGCCUUGAAACAAUGGAU | 318-336 | 316 |
| 356 | NUCCAUUGUUUCAAGGCAU | 873 | AUGCCUUGAAACAAUGGAN | 318-336 | 316 |
| 357 | NUCCAUUGUUUCAAGGCAN | 874 | NUGCCUUGAAACAAUGGAN | 318-336 | 316 |
| 358 | AAGACUUCUAUGGUGUUGG | 875 | CCAACACCAUAGAAGUCUU | 431-449 | 429 |
| 359 | UAGACUUCUAUGGUGUUGG | 876 | CCAACACCAUAGAAGUCUA | 431-449 | 429 |
| 360 | NAGACUUCUAUGGUGUUGG | 877 | CCAACACCAUAGAAGUCUN | 431-449 | 429 |
| 361 | NAGACUUCUAUGGUGUUGN | 878 | NCAACACCAUAGAAGUCUN | 431-449 | 429 |
| 362 | UGGUCAUGUUGUCUCUUAC | 879 | GUAAGAGACAACAUGACCA | 571-589 | 569 |
| 363 | AGGUCAUGUUGUCUCUUAC | 880 | GUAAGAGACAACAUGACCU | 571-589 | 569 |
| 364 | NGGUCAUGUUGUCUCUUAC | 881 | GUAAGAGACAACAUGACCN | 571-589 | 569 |
| 365 | NGGUCAUGUUGUCUCUUAN | 882 | NUAAGAGACAACAUGACCN | 571-589 | 569 |
| 366 | UACGAAACCUCUAAUCUGC | 883 | GCAGAUUAGAGGUUUCGUA | 738-756 | 736 |
| 367 | AACGAAACCUCUAAUCUGC | 884 | GCAGAUUAGAGGUUUCGUU | 738-756 | 736 |
| 368 | NACGAAACCUCUAAUCUGC | 885 | GCAGAUUAGAGGUUUCGUN | 738-756 | 736 |
| 369 | NACGAAACCUCUAAUCUGN | 886 | NCAGAUUAGAGGUUUCGUN | 738-756 | 736 |
| 370 | UCAAGCUUUUCGCAAAUGC | 887 | GCAUUUGCGAAAAGCUUGA | 782-800 | 780 |
| 371 | ACAAGCUUUUCGCAAAUGC | 888 | GCAUUUGCGAAAAGCUUGU | 782-800 | 780 |
| 372 | NCAAGCUUUUCGCAAAUGC | 889 | GCAUUUGCGAAAAGCUUGN | 782-800 | 780 |
| 373 | NCAAGCUUUUCGCAAAUGN | 890 | NCAUUUGCGAAAAGCUUGN | 782-800 | 780 |
| 374 | AGACUGUUCAAGCUUUUCG | 891 | CGAAAAGCUUGAACAGUCU | 789-807 | 787 |
| 375 | UGACUGUUCAAGCUUUUCG | 892 | CGAAAAGCUUGAACAGUCA | 789-807 | 787 |
| 376 | NGACUGUUCAAGCUUUUCG | 893 | CGAAAAGCUUGAACAGUCN | 789-807 | 787 |
| 377 | NGACUGUUCAAGCUUUUCN | 894 | NGAAAAGCUUGAACAGUCN | 789-807 | 787 |
| 378 | ACUUAGUGUUGUCCCCAGU | 895 | ACUGGGGACAACACUAAGU | 907-925 | 905 |
| 379 | UCUUAGUGUUGUCCCCAGU | 896 | ACUGGGGACAACACUAAGA | 907-925 | 905 |
| 380 | NCUUAGUGUUGUCCCCAGU | 897 | ACUGGGGACAACACUAAGN | 907-925 | 905 |
| 381 | NCUUAGUGUUGUCCCCAGN | 898 | NCUGGGGACAACACUAAGN | 907-925 | 905 |
| 382 | CCCUAGUCUUGCCAUUUUG | 899 | CAAAAUGGCAAGACUAGGG | 1038-1056 | 1036 |
| 383 | ACCUAGUCUUGCCAUUUUG | 900 | CAAAAUGGCAAGACUAGGU | 1038-1056 | 1036 |
| 384 | UCCUAGUCUUGCCAUUUUG | 901 | CAAAAUGGCAAGACUAGGA | 1038-1056 | 1036 |
| 385 | NCCUAGUCUUGCCAUUUUG | 902 | CAAAAUGGCAAGACUAGGN | 1038-1056 | 1036 |
| 386 | NCCUAGUCUUGCCAUUUUN | 903 | NAAAAUGGCAAGACUAGGN | 1038-1056 | 1036 |
| 387 | CCAUCAUCAUCCCAGGACU | 904 | AGUCCUGGGAUGAUGAUGG | 1210-1228 | 1208 |
| 388 | ACAUCAUCAUCCCAGGACU | 905 | AGUCCUGGGAUGAUGAUGU | 1210-1228 | 1208 |
| 389 | UCAUCAUCAUCCCAGGACU | 906 | AGUCCUGGGAUGAUGAUGA | 1210-1228 | 1208 |
| 390 | NCAUCAUCAUCCCAGGACU | 907 | AGUCCUGGGAUGAUGAUGN | 1210-1228 | 1208 |
| 391 | NCAUCAUCAUCCCAGGACN | 908 | AGUCCUGGGAUGAUGAUGN | 1210-1228 | 1208 |
| 392 | UUAGCAUGUUGAACAUGCC | 909 | GGCAUGUUCAACAUGCUAA | 1228-1246 | 1226 |
| 393 | AUAGCAUGUUGAACAUGCC | 910 | GGCAUGUUCAACAUGCUAU | 1228-1246 | 1226 |
| 394 | NUAGCAUGUUGAACAUGCC | 911 | GGCAUGUUCAACAUGCUAN | 1228-1246 | 1226 |
| 395 | NUAGCAUGUUGAACAUGEN | 912 | NGCAUGUUCAACAUGCUAN | 1228-1246 | 1226 |
| 396 | CCAAGAUUCAGUAUCGAGA | 913 | UCUCGAUACUGAAUCUUGG | 1262-1280 | 1260 |
| 397 | ACAAGAUUCAGUAUCGAGA | 914 | UCUCGAUACUGAAUCUUGU | 1262-1280 | 1260 |
| 398 | UCAAGAUUCAGUAUCGAGA | 915 | UCUCGAUACUGAAUCUUGA | 1262-1280 | 1260 |
| 399 | NCAAGAUUCAGUAUCGAGA | 916 | UCUCGAUACUGAAUCUUGN | 1262-1280 | 1260 |
| 400 | NCAAGAUUCAGUAUCGAGN | 917 | NCUCGAUACUGAAUCUUGN | 1262-1280 | 1260 |
| 401 | UGUAGAAUCUGUCCACUCC | 918 | GGAGUGGACAGAUUCUACA | 1384-1402 | 1382 |
| 402 | AGUAGAAUCUGUCCACUCC | 919 | GGAGUGGACAGAUUCUACU | 1384-1402 | 1382 |
| 403 | NGUAGAAUCUGUCCACUCC | 920 | GGAGUGGACAGAUUCUACN | 1384-1402 | 1382 |
| 404 | NGUAGAAUCUGUCCACUCN | 921 | NGAGUGGACAGAUUCUACN | 1384-1402 | 1382 |
| 405 | GCUAAAAUUAGCCACAAAU | 922 | AUUUGUGGCUAAUUUUAGC | 1500-1518 | 1498 |
| 406 | ACUAAAAUUAGCCACAAAU | 923 | AUUUGUGGCUAAUUUUAGU | 1500-1518 | 1498 |
| 407 | UCUAAAAUUAGCCACAAAU | 924 | AUUUGUGGCUAAUUUUAGA | 1500-1518 | 1498 |
| 408 | NCUAAAAUUAGCCACAAAU | 925 | AUUUGUGGCUAAUUUUAGN | 1500-1518 | 1498 |
| 409 | NCUAAAAUUAGCCACAAAN | 926 | NUUUGUGGCUAAUUUUAGN | 1500-1518 | 1498 |
| 410 | UCAUGUUGUUCUUUAUCAC | 927 | GUGAUAAAGAACAACAUGA | 1585-1603 | 1583 |
| 411 | ACAUGUUGUUCUUUAUCAC | 928 | GUGAUAAAGAACAACAUGU | 1585-1603 | 1583 |
| 412 | NCAUGUUGUUCUUUAUCAC | 929 | GUGAUAAAGAACAACAUGN | 1585-1603 | 1583 |
| 413 | NCAUGUUGUUCUUUAUCAN | 930 | NUGAUAAAGAACAACAUGN | 1585-1603 | 1583 |
| 414 | UGAUGAACAAUUGAAGAGC | 931 | GCUCUUCAAUUGUUCAUCA | 1639-1657 | 1637 |
| 415 | AGAUGAACAAUUGAAGAGC | 932 | GCUCUUCAAUUGUUCAUCU | 1639-1657 | 1637 |
| 416 | NGAUGAACAAUUGAAGAGC | 933 | GCUCUUCAAUUGUUCAUCN | 1639-1657 | 1637 |
| 417 | NGAUGAACAAUUGAAGAGN | 934 | NCUCUUCAAUUGUUCAUCN | 1639-1657 | 1637 |
| 418 | AUAAGUUUGGUCCUCCAUC | 935 | GAUGGAGGACCAAACUUAU | 1777-1795 | 1775 |
| 419 | UUAAGUUUGGUCCUCCAUC | 936 | GAUGGAGGACCAAACUUAA | 1777-1795 | 1775 |
| 420 | NUAAGUUUGGUCCUCCAUC | 937 | GAUGGAGGACCAAACUUAN | 1777-1795 | 1775 |
| 421 | NUAAGUUUGGUCCUCCAUN | 938 | NAUGGAGGACCAAACUUAN | 1777-1795 | 1775 |
| 422 | UGGUACAUCUGUUCAUCCU | 939 | AGGAUGAACAGAUGUACCA | 2051-2069 | 2049 |
| 423 | AGGUACAUCUGUUCAUCCU | 940 | AGGAUGAACAGAUGUACCU | 2051-2069 | 2049 |
| 424 | NGGUACAUCUGUUCAUCCU | 941 | AGGAUGAACAGAUGUACCN | 2051-2069 | 2049 |
| 425 | NGGUACAUCUGUUCAUCCN | 942 | NGGAUGAACAGAUGUACCN | 2051-2069 | 2049 |
| 426 | CCACCAUGCUAGAAAUUCC | 943 | GGAAUUUCUAGCAUGGUGG | 2128-2146 | 2126 |
| 427 | ACACCAUGCUAGAAAUUCC | 944 | GGAAUUUCUAGCAUGGUGU | 2128-2146 | 2126 |
| 428 | UCACCAUGCUAGAAAUUCC | 945 | GGAAUUUCUAGCAUGGUGA | 2128-2146 | 2126 |
| 429 | NCACCAUGCUAGAAAUUCC | 946 | GGAAUUUCUAGCAUGGUGN | 2128-2146 | 2126 |
| 430 | NCACCAUGCUAGAAAUUCN | 947 | NGAAUUUCUAGCAUGGUGN | 2128-2146 | 2126 |
| 431 | GAGAACUCUUCUUUCUUGA | 948 | UCAAGAAAGAAGAGUUCUC | 2204-2222 | 2202 |
| 432 | AAGAACUCUUCUUUCUUGA | 949 | UCAAGAAAGAAGAGUUCUU | 2204-2222 | 2202 |
| 433 | UAGAACUCUUCUUUCUUGA | 950 | UCAAGAAAGAAGAGUUCUA | 2204-2222 | 2202 |
| 434 | NAGAACUCUUCUUUCUUGA | 951 | UCAAGAAAGAAGAGUUCUN | 2204-2222 | 2202 |
| 435 | NAGAACUCUUCUUUCUUGN | 952 | NCAAGAAAGAAGAGUUCUN | 2204-2222 | 2202 |
| 436 | GAACAGAUCUUCAUGAUCU | 953 | AGAUCAUGAAGAUCUGUUC | 2225-2243 | 2223 |
| 437 | AAACAGAUCUUCAUGAUCU | 954 | AGAUCAUGAAGAUCUGUUU | 2225-2243 | 2223 |
| 438 | UAACAGAUCUUCAUGAUCU | 955 | AGAUCAUGAAGAUCUGUUA | 2225-2243 | 2223 |
| 439 | NAACAGAUCUUCAUGAUCU | 956 | AGAUCAUGAAGAUCUGUUN | 2225-2243 | 2223 |
| 440 | NAACAGAUCUUCAUGAUCN | 957 | NGAUCAUGAAGAUCUGUUN | 2225-2243 | 2223 |
| 441 | CUUCAAUGGUGGAACAGAU | 958 | AUCUGUUCCACCAUUGAAG | 2236-2254 | 2234 |
| 442 | AUUCAAUGGUGGAACAGAU | 959 | AUCUGUUCCACCAUUGAAU | 2236-2254 | 2234 |
| 443 | UUUCAAUGGUGGAACAGAU | 960 | AUCUGUUCCACCAUUGAAA | 2236-2254 | 2234 |
| 444 | NUUCAAUGGUGGAACAGAU | 961 | AUCUGUUCCACCAUUGAAN | 2236-2254 | 2234 |
| 445 | NUUCAAUGGUGGAACAGAN | 962 | NUCUGUUCCACCAUUGAAN | 2236-2254 | 2234 |
| 446 | CUGAGUUCUUCAAUGGUGG | 963 | CCACCAUUGAAGAACUCAG | 2243-2261 | 2241 |
| 447 | AUGAGUUCUUCAAUGGUGG | 964 | CCACCAUUGAAGAACUCAU | 2243-2261 | 2241 |
| 448 | UUGAGUUCUUCAAUGGUGG | 965 | CCACCAUUGAAGAACUCAA | 2243-2261 | 2241 |
| 449 | NUGAGUUCUUCAAUGGUGG | 966 | CCACCAUUGAAGAACUCAN | 2243-2261 | 2241 |
| 450 | NUGAGUUCUUCAAUGGUGG | 967 | NCACCAUUGAAGAACUCAN | 2243-2261 | 2241 |

TABLE 2D
IAV RNAi agent (targeting PB1) Antisense Strand and Sense Strand Core Stretch Base Sequences
(N = any nucleobase)

| | | | | Corresponding | |
|---|---|---|---|---|---|
| | Antisense Strand Base Sequence | | Sense Strand Base Sequence | Positions of | Targeted |
| SEQ | (5′ → 3′) | SEQ | (5′ → 3′) | Identified | Viral |
| ID | (Shown as an Unmodified | ID | (Shown as an Unmodified | Sequence on | Genome |
| NO:. | Nucleotide Sequence) | NO:. | Nucleotide Sequence) | SEQ ID NO: 4 | Position |
| 451 | UGGUCUUAGUGAGUAUCUC | 968 | GAGAUACUCACUAAGACCA | 52-70 | 50 |
| 452 | AGGUCUUAGUGAGUAUCUC | 969 | GAGAUACUCACUAAGACCU | 52-70 | 50 |
| 453 | NGGUCUUAGUGAGUAUCUC | 970 | GAGAUACUCACUAAGACCN | 52-70 | 50 |
| 454 | NGGUCUUAGUGAGUAUCUN | 971 | NAGAUACUCACUAAGACCN | 52-70 | 50 |
| 455 | CCAUGUUUCAACCUUUCGA | 972 | UCGAAAGGUUGAAACAUGG | 365-383 | 363 |
| 456 | ACAUGUUUCAACCUUUCGA | 973 | UCGAAAGGUUGAAACAUGU | 365-383 | 363 |
| 457 | UCAUGUUUCAACCUUUCGA | 974 | UCGAAAGGUUGAAACAUGA | 365-383 | 363 |
| 458 | NCAUGUUUCAACCUUUCGA | 975 | UCGAAAGGUUGAAACAUGN | 365-383 | 363 |
| 459 | NCAUGUUUCAACCUUUCGN | 976 | UCGAAAGGUUGAAACAUGN | 365-383 | 363 |
| 460 | CUAGCAUGUACGCCACCAU | 977 | AUGGUGGCGUACAUGCUAG | 604-622 | 602 |
| 461 | AUAGCAUGUACGCCACCAU | 978 | AUGGUGGCGUACAUGCUAU | 604-622 | 602 |
| 462 | UUAGCAUGUACGCCACCAU | 979 | AUGGUGGCGUACAUGCUAA | 604-622 | 602 |
| 463 | NUAGCAUGUACGCCACCAU | 980 | AUGGUGGCGUACAUGCUAN | 604-622 | 602 |
| 464 | NUAGCAUGUACGCCACCAN | 981 | NUGGUGGCGUACAUGCUAN | 604-622 | 602 |
| 465 | UUACUAUGUUUCUAGCAGC | 982 | GCUGCUAGAAACAUAGUAA | 784-802 | 782 |
| 466 | AUACUAUGUUUCUAGCAGC | 983 | GCUGCUAGAAACAUAGUAU | 784-802 | 782 |
| 467 | NUACUAUGUUUCUAGCAGC | 984 | GCUGCUAGAAACAUAGUAN | 784-802 | 782 |
| 468 | NUACUAUGUUUCUAGCAGN | 985 | NCUGCUAGAAACAUAGUAN | 784-802 | 782 |
| 469 | GACUGAUGAUCCGCUUGUC | 986 | GACAAGCGGAUCAUCAGUC | 996-1014 | 994 |
| 470 | AACUGAUGAUCCGCUUGUC | 987 | GACAAGCGGAUCAUCAGUU | 996-1014 | 994 |
| 471 | UACUGAUGAUCCGCUUGUC | 988 | GACAAGCGGAUCAUCAGUA | 996-1014 | 994 |
| 472 | NACUGAUGAUCCGCUUGUC | 989 | GACAAGCGGAUCAUCAGUN | 996-1014 | 994 |
| 473 | NACUGAUGAUCCGCUUGUN | 990 | NACAAGCGGAUCAUCAGUN | 996-1014 | 994 |
| 474 | CCUUGAUCAUGCAAUCCUC | 991 | GAGGAUUGCAUGAUCAAGG | 1219-1237 | 1217 |
| 475 | ACUUGAUCAUGCAAUCCUC | 992 | GAGGAUUGCAUGAUCAAGU | 1219-1237 | 1217 |
| 476 | UCUUGAUCAUGCAAUCCUC | 993 | GAGGAUUGCAUGAUCAAGA | 1219-1237 | 1217 |
| 477 | NCUUGAUCAUGCAAUCCUC | 994 | GAGGAUUGCAUGAUCAAGN | 1219-1237 | 1217 |
| 478 | NCUUGAUCAUGCAAUCCUN | 995 | NAGGAUUGCAUGAUCAAGN | 1219-1237 | 1217 |
| 479 | GGUCAAUACUCACUACCAC | 996 | GUGGUAGUGAGUAUUGACC | 1480-1498 | 1478 |
| 480 | AGUCAAUACUCACUACCAC | 997 | GUGGUAGUGAGUAUUGACU | 1480-1498 | 1478 |
| 481 | UGUCAAUACUCACUACCAC | 998 | GUGGUAGUGAGUAUUGACA | 1480-1498 | 1478 |
| 482 | NGUCAAUACUCACUACCAC | 999 | GUGGUAGUGAGUAUUGACN | 1480-1498 | 1478 |
| 483 | NGUCAAUACUCACUACCAN | 1000 | NUGGUAGUGAGUAUUGACN | 1480-1498 | 1478 |
| 484 | AGACAAUAGUACGUUCCCU | 1001 | AGGGAACGUACUAUUGUCU | 1524-1542 | 1522 |
| 485 | UGACAAUAGUACGUUCCCU | 1002 | AGGGAACGUACUAUUGUCA | 1524-1542 | 1522 |
| 486 | NGACAAUAGUACGUUCCCU | 1003 | AGGGAACGUACUAUUGUCN | 1524-1542 | 1522 |
| 487 | NGACAAUAGUACGUUCCCN | 1004 | NGGGAACGUACUAUUGUCN | 1524-1542 | 1522 |
| 488 | CCAUUGAUCUCCCACAUCA | 1005 | UGAUGUGGGAGAUCAAUGG | 1604-1622 | 1602 |
| 489 | ACAUUGAUCUCCCACAUCA | 1006 | UGAUGUGGGAGAUCAAUGU | 1604-1622 | 1602 |
| 490 | UCAUUGAUCUCCCACAUCA | 1007 | UGAUGUGGGAGAUCAAUGA | 1604-1622 | 1602 |
| 491 | NCAUUGAUCUCCCACAUCA | 1008 | UGAUGUGGGAGAUCAAUGN | 1604-1622 | 1602 |
| 492 | NCAUUGAUCUCCCACAUCN | 1009 | NGAUGUGGGAGAUCAAUGN | 1604-1622 | 1602 |
| 493 | UGGAACAGUGUCCUUACGA | 1010 | UCGUAAGGACACUGUUCCA | 1784-1802 | 1782 |
| 494 | AGGAACAGUGUCCUUACGA | 1011 | UCGUAAGGACACUGUUCCU | 1784-1802 | 1782 |
| 495 | NGGAACAGUGUCCUUACGA | 1012 | UCGUAAGGACACUGUUCCN | 1784-1802 | 1782 |
| 496 | NGGAACAGUGUCCUUACGN | 1013 | NCGUAAGGACACUGUUCCN | 1784-1802 | 1782 |
| 497 | UUGUUGUAAUUGAAUACUG | 1014 | CAGUAUUCAAUUACAACAA | 1961-1979 | 1959 |
| 498 | AUGUUGUAAUUGAAUACUG | 1015 | CAGUAUUCAAUUACAACAU | 1961-1979 | 1959 |
| 499 | NUGUUGUAAUUGAAUACUG | 1016 | CAGUAUUCAAUUACAACAN | 1961-1979 | 1959 |
| 500 | NUGUUGUAAUUGAAUACUN | 1017 | NAGUAUUCAAUUACAACAN | 1961-1979 | 1959 |
| 501 | CAGUAAGUAUGCUAGAGUC | 1018 | GACUCUAGCAUACUUACUG | 2218-2236 | 2216 |
| 502 | AAGUAAGUAUGCUAGAGUC | 1019 | GACUCUAGCAUACUUACUU | 2218-2236 | 2216 |
| 503 | UAGUAAGUAUGCUAGAGUC | 1020 | GACUCUAGCAUACUUACUA | 2218-2236 | 2216 |
| 504 | NAGUAAGUAUGCUAGAGUC | 1021 | GACUCUAGCAUACUUACUN | 2218-2236 | 2216 |
| 505 | NAGUAAGUAUGCUAGAGUN | 1022 | NACUCUAGCAUACUUACUN | 2218-2236 | 2216 |

TABLE 2E
IAV RNAi agent (targeting NP) Antisense Strand and Sense Strand Core Stretch Base Sequences
(N = any nucleobase)

| | | | | Corresponding | |
|---|---|---|---|---|---|
| | Antisense Strand Base Sequence | | Sense Strand Base Sequence | Positions of | Targeted |
| SEQ | (5′ → 3′) | SEQ | (5′ → 3′) | Identified | Viral |
| ID | (Shown as an Unmodified | ID | (Shown as an Unmodified | Sequence on | Genome |
| NO:. | Nucleotide Sequence) | NO:. | Nucleotide Sequence) | SEQ ID NO: 5 | Position |
| 506 | CACCAAUCAUUCUUCCGAC | 1023 | GUCGGAAGAAUGAUUGGUG | 85-103 | 83 |
| 507 | AACCAAUCAUUCUUCCGAC | 1024 | GUCGGAAGAAUGAUUGGUU | 85-103 | 83 |
| 508 | UACCAAUCAUUCUUCCGAC | 1025 | GUCGGAAGAAUGAUUGGUA | 85-103 | 83 |
| 509 | NACCAAUCAUUCUUCCGAC | 1026 | GUCGGAAGAAUGAUUGGUN | 85-103 | 83 |
| 510 | NACCAAUCAUUCUUCCGAN | 1027 | NUCGGAAGAAUGAUUGGUN | 85-103 | 83 |
| 511 | AUGCUAUUCUGGAUUAGUC | 1028 | GACUAAUCCAGAAUAGCAU | 164-182 | 162 |
| 512 | UUGCUAUUCUGGAUUAGUC | 1029 | GACUAAUCCAGAAUAGCAA | 164-182 | 162 |
| 513 | NUGCUAUUCUGGAUUAGUC | 1030 | GACUAAUCCAGAAUAGCAN | 164-182 | 162 |
| 514 | NUGCUAUUCUGGAUUAGUN | 1031 | NACUAAUCCAGAAUAGCAN | 164-182 | 162 |
| 515 | GCAGAAAGCACCAUCCUCU | 1032 | AGAGGAUGGUGCUUUCUGC | 191-209 | 189 |
| 516 | ACAGAAAGCACCAUCCUCU | 1033 | AGAGGAUGGUGCUUUCUGU | 191-209 | 189 |
| 517 | UCAGAAAGCACCAUCCUCU | 1034 | AGAGGAUGGUGCUUUCUGA | 191-209 | 189 |
| 518 | NCAGAAAGCACCAUCCUCU | 1035 | AGAGGAUGGUGCUUUCUGN | 191-209 | 189 |
| 519 | NCAGAAAGCACCAUCCUCN | 1036 | NGAGGAUGGUGCUUUCUGN | 191-209 | 189 |
| 520 | GCCAAAUCAUGAUAUGAGU | 1037 | ACUCAUAUCAUGAUUUGGC | 400-418 | 398 |
| 521 | ACCAAAUCAUGAUAUGAGU | 1038 | ACUCAUAUCAUGAUUUGGU | 400-418 | 398 |
| 522 | UCCAAAUCAUGAUAUGAGU | 1039 | ACUCAUAUCAUGAUUUGGA | 400-418 | 398 |
| 523 | NCCAAAUCAUGAUAUGAGU | 1040 | ACUCAUAUCAUGAUUUGGN | 400-418 | 398 |
| 524 | NCCAAAUCAUGAUAUGAGN | 1041 | NCUCAUAUCAUGAUUUGGN | 400-418 | 398 |
| 525 | CUGAUAUGUGGCAUCAUUC | 1042 | GAAUGAUGCCACAUAUCAG | 429-447 | 427 |
| 526 | AUGAUAUGUGGCAUCAUUC | 1043 | GAAUGAUGCCACAUAUCAU | 429-447 | 427 |
| 527 | UUGAUAUGUGGCAUCAUUC | 1044 | GAAUGAUGCCACAUAUCAA | 429-447 | 427 |
| 528 | NUGAUAUGUGGCAUCAUUC | 1045 | GAAUGAUGCCACAUAUCAN | 429-447 | 427 |
| 529 | NUGAUAUGUGGCAUCAUUN | 1046 | NAAUGAUGCCACAUAUCAN | 429-447 | 427 |
| 530 | UGUUGAACCUUGCAUUAGA | 1047 | UCUAAUGCAAGGUUCAACA | 495-513 | 493 |
| 531 | AGUUGAACCUUGCAUUAGA | 1048 | UCUAAUGCAAGGUUCAACU | 495-513 | 493 |
| 532 | NGUUGAACCUUGCAUUAGA | 1049 | UCUAAUGCAAGGUUCAACN | 495-513 | 493 |
| 533 | NGUUGAACCUUGCAUUAGN | 1050 | NCUAAUGCAAGGUUCAACN | 495-513 | 493 |
| 534 | CCACGUUUGAUCAUUCUGA | 1051 | UCAGAAUGAUCAAACGUGG | 581-599 | 579 |
| 535 | ACACGUUUGAUCAUUCUGA | 1052 | UCAGAAUGAUCAAACGUGU | 581-599 | 579 |
| 536 | UCACGUUUGAUCAUUCUGA | 1053 | UCAGAAUGAUCAAACGUGA | 581-599 | 579 |
| 537 | NCACGUUUGAUCAUUCUGA | 1054 | UCAGAAUGAUCAAACGUGN | 581-599 | 579 |
| 538 | NCACGUUUGAUCAUUCUGN | 1055 | NCAGAAUGAUCAAACGUGN | 581-599 | 579 |
| 539 | CCAGAAAUUUCGGUCAUUG | 1056 | CAAUGACCGAAAUUUCUGG | 603-621 | 601 |
| 540 | ACAGAAAUUUCGGUCAUUG | 1057 | CAAUGACCGAAAUUUCUGU | 603-621 | 601 |
| 541 | UCAGAAAUUUCGGUCAUUG | 1058 | CAAUGACCGAAAUUUCUGA | 603-621 | 601 |
| 542 | NCAGAAAUUUCGGUCAUUG | 1059 | CAAUGACCGAAAUUUCUGN | 603-621 | 601 |
| 543 | NCAGAAAUUUCGGUCAUUN | 1060 | NAAUGACCGAAAUUUCUGN | 603-621 | 601 |
| 544 | CCUUUGAGGAUAUUGCACA | 1061 | UGUGCAAUAUCCUCAAAGG | 665-683 | 663 |
| 545 | ACUUUGAGGAUAUUGCACA | 1062 | UGUGCAAUAUCCUCAAAGU | 665-683 | 663 |
| 546 | UCUUUGAGGAUAUUGCACA | 1063 | UGUGCAAUAUCCUCAAAGA | 665-683 | 663 |
| 547 | NCUUUGAGGAUAUUGCACA | 1064 | UGUGCAAUAUCCUCAAAGN | 665-683 | 663 |
| 548 | NCUUUGAGGAUAUUGCACN | 1065 | NGUGCAAUAUCCUCAAAGN | 665-683 | 663 |
| 549 | CUCAGAAUGAGUGCUGACC | 1066 | GGUCAGCACUCAUUCUGAG | 782-800 | 780 |
| 550 | AUCAGAAUGAGUGCUGACC | 1067 | GGUCAGCACUCAUUCUGAU | 782-800 | 780 |
| 551 | UUCAGAAUGAGUGCUGACC | 1068 | GGUCAGCACUCAUUCUGAA | 782-800 | 780 |
| 552 | NUCAGAAUGAGUGCUGACC | 1069 | GGUCAGCACUCAUUCUGAN | 782-800 | 780 |
| 553 | NUCAGAAUGAGUGCUGACN | 1070 | NGUCAGCACUCAUUCUGAN | 782-800 | 780 |
| 554 | GGAUUUAUGUGCAACUGAU | 1071 | AUCAGUUGCACAUAAAUCC | 804-822 | 802 |
| 555 | AGAUUUAUGUGCAACUGAU | 1072 | AUCAGUUGCACAUAAAUCU | 804-822 | 802 |
| 556 | UGAUUUAUGUGCAACUGAU | 1073 | AUCAGUUGCACAUAAAUCA | 804-822 | 802 |
| 557 | NGAUUUAUGUGCAACUGAU | 1074 | AUCAGUUGCACAUAAAUCN | 804-822 | 802 |
| 558 | NGAUUUAUGUGCAACUGAN | 1075 | NUCAGUUGCACAUAAAUCN | 804-822 | 802 |
| 559 | CACCAAUUGACUCUUGUGA | 1076 | UCACAAGAGUCAAUUGGUG | 969-987 | 967 |
| 560 | AACCAAUUGACUCUUGUGA | 1077 | UCACAAGAGUCAAUUGGUU | 969-987 | 967 |
| 561 | UACCAAUUGACUCUUGUGA | 1078 | UCACAAGAGUCAAUUGGUA | 969-987 | 967 |
| 562 | NACCAAUUGACUCUUGUGA | 1079 | UCACAAGAGUCAAUUGGUN | 969-987 | 967 |
| 563 | NACCAAUUGACUCUUGUGN | 1080 | NCACAAGAGUCAAUUGGUN | 969-987 | 967 |
| 564 | CUCUUAUGAAACUUGAUAC | 1081 | GUAUCAAGUUUCAUAAGAG | 1027-1045 | 1025 |
| 565 | AUCUUAUGAAACUUGAUAC | 1082 | GUAUCAAGUUUCAUAAGAU | 1027-1045 | 1025 |
| 566 | UUCUUAUGAAACUUGAUAC | 1083 | GUAUCAAGUUUCAUAAGAA | 1027-1045 | 1025 |
| 567 | NUCUUAUGAAACUUGAUAC | 1084 | GUAUCAAGUUUCAUAAGAN | 1027-1045 | 1025 |
| 568 | NUCUUAUGAAACUUGAUAN | 1085 | NUAUCAAGUUUCAUAAGAN | 1027-1045 | 1025 |
| 569 | UGAGAAUGUAGGCUGCACA | 1086 | UGUGCAGCCUACAUUCUCA | 1221-1239 | 1219 |
| 570 | AGAGAAUGUAGGCUGCACA | 1087 | UGUGCAGCCUACAUUCUCU | 1221-1239 | 1219 |
| 571 | NGAGAAUGUAGGCUGCACA | 1088 | UGUGCAGCCUACAUUCUCN | 1221-1239 | 1219 |
| 572 | NGAGAAUGUAGGCUGCACN | 1089 | NGUGCAGCCUACAUUCUCN | 1221-1239 | 1219 |
| 573 | UUACUCAUGUCAAAGGAAG | 1090 | CUUCCUUUGACAUGAGUAA | 1430-1448 | 1428 |
| 574 | AUACUCAUGUCAAAGGAAG | 1091 | CUUCCUUUGACAUGAGUAU | 1430-1448 | 1428 |
| 575 | NUACUCAUGUCAAAGGAAG | 1092 | CUUCCUUUGACAUGAGUAN | 1430-1448 | 1428 |
| 576 | NUACUCAUGUCAAAGGAAN | 1093 | NUUCCUUUGACAUGAGUAN | 1430-1448 | 1428 |
| 577 | AGAAAUAAGACCCUUCAUU | 1094 | AAUGAAGGGUCUUAUUUCU | 1447-1465 | 1445 |
| 578 | UGAAAUAAGACCCUUCAUU | 1095 | AAUGAAGGGUCUUAUUUCA | 1447-1465 | 1445 |
| 579 | NGAAAUAAGACCCUUCAUU | 1096 | AAUGAAGGGUCUUAUUUCN | 1447-1465 | 1445 |
| 580 | NGAAAUAAGACCCUUCAUN | 1097 | NAUGAAGGGUCUUAUUUCN | 1447-1465 | 1445 |

TABLE 2F
IAV RNAi agent (targeting PA) Antisense Strand and Sense Strand Core Stretch Base Sequences
(N = any nucleobase)

| | | | | Corresponding | |
|---|---|---|---|---|---|
| | Antisense Strand Base Sequence | | Sense Strand Base Sequence | Positions of | Targeted |
| SEQ | (5′ → 3′) | SEQ | (5′ → 3′) | Identified | Viral |
| ID | (Shown as an Unmodified | ID | (Shown as an Unmodified | Sequence on | Genome |
| NO:. | Nucleotide Sequence) | NO:. | Nucleotide Sequence) | SEQ ID NO: 6 | Position |
| 581 | GAAGCAUUGUCGCACAAAG | 1098 | CUUUGUGCGACAAUGCUUC | 9-27 | 7 |
| 582 | AAAGCAUUGUCGCACAAAG | 1099 | CUUUGUGCGACAAUGCUUU | 9-27 | 7 |
| 583 | UAAGCAUUGUCGCACAAAG | 1100 | CUUUGUGCGACAAUGCUUA | 9-27 | 7 |
| 584 | NAAGCAUUGUCGCACAAAG | 1101 | CUUUGUGCGACAAUGCUUN | 9-27 | 7 |
| 585 | NAAGCAUUGUCGCACAAAN | 1102 | NUUUGUGCGACAAUGCUUN | 9-27 | 7 |
| 586 | UGAAAUGGAAAUCCGAAUA | 1103 | UAUUCGGAUUUCCAUUUCA | 142-160 | 140 |
| 587 | AGAAAUGGAAAUCCGAAUA | 1104 | UAUUCGGAUUUCCAUUUCU | 142-160 | 140 |
| 588 | NGAAAUGGAAAUCCGAAUA | 1105 | UAUUCGGAUUUCCAUUUCN | 142-160 | 140 |
| 589 | NGAAAUGGAAAUCCGAAUN | 1106 | NAUUCGGAUUUCCAUUUCN | 142-160 | 140 |
| 590 | CCAUGAUUCGGUCUCUUCC | 1107 | GGAAGAGACCGAAUCAUGG | 241-259 | 239 |
| 591 | ACAUGAUUCGGUCUCUUCC | 1108 | GGAAGAGACCGAAUCAUGU | 241-259 | 239 |
| 592 | UCAUGAUUCGGUCUCUUCC | 1109 | GGAAGAGACCGAAUCAUGA | 241-259 | 239 |
| 593 | NCAUGAUUCGGUCUCUUCC | 1110 | GGAAGAGACCGAAUCAUGN | 241-259 | 239 |
| 594 | NCAUGAUUCGGUCUCUUCN | 1111 | NGAAGAGACCGAAUCAUGN | 241-259 | 239 |
| 595 | UGAAAAGCCUAGUUUUGAU | 1112 | AUCAAAACUAGGCUUUUCA | 511-529 | 509 |
| 596 | AGAAAAGCCUAGUUUUGAU | 1113 | AUCAAAACUAGGCUUUUCU | 511-529 | 509 |
| 597 | NGAAAAGCCUAGUUUUGAU | 1114 | AUCAAAACUAGGCUUUUCN | 511-529 | 509 |
| 598 | NGAAAAGCCUAGUUUUGAN | 1115 | NUCAAAACUAGGCUUUUCN | 511-529 | 509 |
| 599 | GACGAAAGGAAUCCCAUAG | 1116 | CUAUGGGAUUCCUUUCGUC | 559-577 | 557 |
| 600 | AACGAAAGGAAUCCCAUAG | 1117 | CUAUGGGAUUCCUUUCGUU | 559-577 | 557 |
| 601 | UACGAAAGGAAUCCCAUAG | 1118 | CUAUGGGAUUCCUUUCGUA | 559-577 | 557 |
| 602 | NACGAAAGGAAUCCCAUAG | 1119 | CUAUGGGAUUCCUUUCGUN | 559-577 | 557 |
| 503 | NACGAAAGGAAUCCCAUAN | 1120 | NUAUGGGAUUCCUUUCGUN | 559-577 | 557 |
| 604 | CUUCAAUUGUCUCUUCGCC | 1121 | GGCGAAGAGACAAUUGAAG | 589-607 | 587 |
| 605 | AUUCAAUUGUCUCUUCGCC | 1122 | GGCGAAGAGACAAUUGAAU | 589-607 | 587 |
| 606 | UUUCAAUUGUCUCUUCGCC | 1123 | GGCGAAGAGACAAUUGAAA | 589-607 | 587 |
| 607 | NUUCAAUUGUCUCUUCGCC | 1124 | GGCGAAGAGACAAUUGAAN | 589-607 | 587 |
| 608 | NUUCAAUUGUCUCUUCGCN | 1125 | NGCGAAGAGACAAUUGAAN | 589-607 | 587 |
| 609 | CUCGAAUCCAUCUACAUAG | 1126 | CUAUGUAGAUGGAUUCGAG | 693-711 | 691 |
| 610 | AUCGAAUCCAUCUACAUAG | 1127 | CUAUGUAGAUGGAUUCGAU | 693-711 | 691 |
| 611 | UUCGAAUCCAUCUACAUAG | 1128 | CUAUGUAGAUGGAUUCGAA | 693-711 | 691 |
| 612 | NUCGAAUCCAUCUACAUAG | 1129 | CUAUGUAGAUGGAUUCGAN | 693-711 | 691 |
| 613 | NUCGAAUCCAUCUACAUAN | 1130 | NUAUGUAGAUGGAUUCGAN | 693-711 | 691 |
| 614 | UGACAUUUGGGAAAGCUUG | 1131 | CAAGCUUUCCCAAAUGUCA | 732-750 | 730 |
| 615 | AGACAUUUGGGAAAGCUUG | 1132 | CAAGCUUUCCCAAAUGUCU | 732-750 | 730 |
| 616 | NGACAUUUGGGAAAGCUUG | 1133 | CAAGCUUUCCCAAAUGUCN | 732-750 | 730 |
| 617 | NGACAUUUGGGAAAGCUUN | 1134 | NAAGCUUUCCCAAAUGUCN | 732-750 | 730 |
| 618 | UUUGAUUGCAUCAUAUAGU | 1135 | ACUAUAUGAUGCAAUCAAA | 909-927 | 907 |
| 619 | AUUGAUUGCAUCAUAUAGU | 1136 | ACUAUAUGAUGCAAUCAAU | 909-927 | 907 |
| 620 | NUUGAUUGCAUCAUAUAGU | 1137 | ACUAUAUGAUGCAAUCAAN | 909-927 | 907 |
| 621 | NUUGAUUGCAUCAUAUAGN | 1138 | NCUAUAUGAUGCAAUCAAN | 909-927 | 907 |
| 622 | AAGGUCUCCAACAUCUUUG | 1139 | CAAAGAUGUUGGAGACCUU | 1152-1170 | 1150 |
| 623 | UAGGUCUCCAACAUCUUUG | 1140 | CAAAGAUGUUGGAGACCUA | 1152-1170 | 1150 |
| 624 | NAGGUCUCCAACAUCUUUG | 1141 | CAAAGAUGUUGGAGACCUN | 1152-1170 | 1150 |
| 625 | NAGGUCUCCAACAUCUUUN | 1142 | NAAAGAUGUUGGAGACCUN | 1152-1170 | 1150 |
| 626 | UCAUCAAGUUCUAUCCAGC | 1143 | GCUGGAUAGAACUUGAUGA | 1262-1280 | 1260 |
| 627 | ACAUCAAGUUCUAUCCAGC | 1144 | GCUGGAUAGAACUUGAUGU | 1262-1280 | 1260 |
| 628 | NCAUCAAGUUCUAUCCAGC | 1145 | GCUGGAUAGAACUUGAUGN | 1262-1280 | 1260 |
| 629 | NCAUCAAGUUCUAUCCAGN | 1146 | NCUGGAUAGAACUUGAUGN | 1262-1280 | 1260 |
| 630 | ACAUUUGCUUAUCAUUGGG | 1147 | CCCAAUGAUAAGCAAAUGU | 1449-1467 | 1447 |
| 631 | UCAUUUGCUUAUCAUUGGG | 1148 | CCCAAUGAUAAGCAAAUGA | 1449-1467 | 1447 |
| 632 | NCAUUUGCUUAUCAUUGGG | 1149 | CCCAAUGAUAAGCAAAUGN | 1449-1467 | 1447 |
| 633 | NCAUUUGCUUAUCAUUGGN | 1150 | NCCAAUGAUAAGCAAAUGN | 1449-1467 | 1447 |
| 634 | UCAUUAAUCAGGCACUCCU | 1151 | AGGAGUGCCUGAUUAAUGA | 2072-2090 | 2070 |
| 635 | ACAUUAAUCAGGCACUCCU | 1152 | AGGAGUGCCUGAUUAAUGU | 2072-2090 | 2070 |
| 636 | NCAUUAAUCAGGCACUCCU | 1153 | AGGAGUGCCUGAUUAAUGN | 2072-2090 | 2070 |
| 637 | NCAUUAAUCAGGCACUCCN | 1154 | NGGAGUGCCUGAUUAAUGN | 2072-2090 | 2070 |

[0111] The IAV RNAi agent sense strands and antisense strands that comprise or consist of the nucleotide sequences in Table 2A, 2B, 2C, 2D, 2E, and 2F can be modified nucleotides or unmodified nucleotides. In some embodiments, the IAV RNAi agents having the sense and antisense strand sequences that comprise or consist of any of the nucleotide sequences in Table 2A, 2B, 2C, 2D, 2E, and 2F are all or substantially all modified nucleotides.

[0112] In some embodiments, the antisense strand of an IAV RNAi agent disclosed herein differs by 0, 1, 2, or 3 nucleotides from any of the antisense strand sequences in Table 2A, 2B, 2C, 2D, 2E, and 2F. In some embodiments, the sense strand of an IAV RNAi agent disclosed herein differs by 0, 1, 2, or 3 nucleotides from any of the sense strand sequences in Table 2A, 2B, 2C, 2D, 2E, and 2F.

[0113] As used herein, each N listed in a sequence disclosed in Table 2A, 2B, 2C, 2D, 2E, and 2F may be independently selected from any and all nucleobases (including those found on both modified and unmodified nucleotides). In some embodiments, an N nucleotide listed in a sequence disclosed in Table 2A, 2B, 2C, 2D, 2E, and 2F has a nucleobase that is complementary to the N nucleotide at the corresponding position on the other strand. In some embodiments, an N nucleotide listed in a sequence disclosed in Table 2A, 2B, 2C, 2D, 2E, and 2F has a nucleobase that is not complementary to the N nucleotide at the corresponding position on the other strand. In some embodiments, an N nucleotide listed in a sequence disclosed in Table 2A, 2B, 2C, 2D, 2E, and 2F has a nucleobase that is the same as the N nucleotide at the corresponding position on the other strand. In some embodiments, an N nucleotide listed in a sequence disclosed in Table 2A, 2B, 2C, 2D, 2E, and 2F has a nucleobase that is different from the N nucleotide at the corresponding position on the other strand.

[0114] Certain modified IAV RNAi agent sense and antisense strands are provided in Table 3A, 3B, 3C, 3D, 3E, 3F, 4A, 4B, 4C, 4D, 4E, 4F, 5A, 5B, 5C, 5D, 5E, 5F, 6A, 6B, 6C, 6D, 6E, 6F, 10A, 10B, 10C, 10D, 10E, and 10F. Certain modified IAV RNAi agent antisense strands, as well as their underlying unmodified nucleobase sequences, are provided in Table 3A, 3B, 3C, 3D, 3E, 3F. Certain modified IAV RNAi agent sense strands, as well as their underlying unmodified nucleobase sequences, are provided in Tables 4A, 4B, 4C, 4D, 4E, 4F, 5A, 5B, 5C, 5D, 5E, 5F, 6A, 6B, 6C, 6D, 6E, and 6F. In forming IAV RNAi agents, each of the nucleotides in each of the underlying base sequences listed in Tables 3A, 3B, 3C, 3D, 3E, 3F, 4A, 4B, 4C, 4D, 4E, 4F, 5A, 5B, 5C, 5D, 5E, 5F, 6A, 6B, 6C, 6D, 6E, 6F, as well as in Tables 2A, 2B, 2C, 2D, 2E, 2F, above, can be a modified nucleotide.

[0115] The IAV RNAi agents described herein are formed by annealing an antisense strand with a sense strand. A sense strand containing a sequence listed in Table 2A, 2B, 2C, 2D, 2E, 2F, 4A, 4B, 4C, 4D, 4E, 4F, 5A, 5B, 5C, 5D, 5E, 5F, 6A, 6B, 6C, 6D, 6E, or 6F can be hybridized to any antisense strand containing a sequence listed in Table 2A, 2B, 2C, 2D, 2E, 2F, 3A, 3B, 3C, 3D, 3E, or 3F provided the two sequences have a region of at least 85% complementarity over a contiguous 16, 17, 18, 19, 20, or 21 nucleotide sequence.

[0116] In some embodiments, an IAV RNAi agent antisense strand comprises a nucleotide sequence of any of the sequences in Table 2A, 2B, 2C, 2D, 2E, 2F, 3A, 3B, 3C, 3D, 3E, or 3F.

[0117] In some embodiments, an IAV RNAi agent comprises or consists of a duplex having the nucleobase sequences of the sense strand and the antisense strand of any of the sequences in 2A, 2B, 2C, 2D, 2E, 2F, 3A, 3B, 3C, 3D, 3E, 3F, 4A, 4B, 4C, 4D, 4E, 4F, 5A, 5B, 5C, 5D, 5E, 5F, 6A, 6B, 6C, 6D, 6E, 6F, 10A, 10B, 10C, 10D, 10E, or 10F.

[0118] Examples of antisense strands containing modified nucleotides are provided in Table 3A, 3B, 3C, 3D, 3E, and 3F. Examples of sense strands containing modified nucleotides are provided in Tables 4A, 4B, 4C, 4D, 4E, 4F, 5A, 5B, 5C, 5D, 5E, 5F, 6A, 6B, 6C, 6D, 6E, and 6F.

[0119] As used in Tables 3A, 3B, 3C, 3D, 3E, 3F, 4A, 4B, 4C, 4D, 4E, 4F, 5A, 5B, 5C, 5D, 5E, 5F, 6A, 6B, 6C, 6D, 6E, 6F, 10A, 10B, 10C, 10D, 10E, and 10F, the following notations are used to indicate modified nucleotides, targeting groups, and linking groups:
[0120] A=adenosine-3′-phosphate
[0121] C=cytidine-3′-phosphate
[0122] G=guanosine-3′-phosphate
[0123] U=uridine-3′-phosphate
[0124] I=inosine-3′-phosphate
[0125] a=2′-O-methyladenosine-3′-phosphate
[0126] as =2′-O-methyladenosine-3′-phosphorothioate
[0127] c=2′-O-methylcytidine-3′-phosphate
[0128] cs=2′-O-methylcytidine-3′-phosphorothioate
[0129] g=2′-O-methylguanosine-3′-phosphate
[0130] gs=2′-O-methylguanosine-3′-phosphorothioate
[0131] i=2′-O-methylinosine-3′-phosphate
[0132] is=2′-O-methylinosine-3′-phosphorothioate
[0133] t=2′-O-methyl-5-methyluridine-3′-phosphate
[0134] ts=2′-O-methyl-5-methyluridine-3′-phosphorothioate
[0135] u=2′-O-methyluridine-3′-phosphate
[0136] us=2′-O-methyluridine-3′-phosphorothioate
[0137] Af=2′-fluoroadenosine-3′-phosphate
[0138] Afs=2′-fluoroadenosine-3′-phosporothioate
[0139] Cf=2′-fluorocytidine-3′-phosphate
[0140] Cfs=2′-fluorocytidine-3′-phosphorothioate
[0141] Gf=2′-fluoroguanosine-3′-phosphate
[0142] Gfs=2′-fluoroguanosine-3′-phosphorothioate
[0143] Tf=2′-fluoro-5′-methyluridine-3′-phosphate
[0144] Tfs=2′-fluoro-5′-methyluridine-3′-phosphorothioate
[0145] Uf=2′-fluorouridine-3′-phosphate
[0146] Ufs=2′-fluorouridine-3′-phosphorothioate
[0147] dT=2′-deoxythymidine-3′-phosphate
[0148] A_{UNA}=2′,3′-seco-adenosine-3′-phosphate
[0149] A_{UNA}s=2′,3′-seco-adenosine-3′-phosphorothioate
[0150] C_{UNA}=2′,3′-seco-cytidine-3′-phosphate
[0151] C_{UNA}s=2′,3′-seco-cytidine-3′-phosphorothioate
[0152] G_{UNA}=2′,3′-seco-guanosine-3′-phosphate
[0153] G_{UNA}s=2′,3′-seco-guanosine-3′-phosphorothioate
[0154] U_{UNA}=2′,3′-seco-uridine-3′-phosphate
[0155] U_{UNA}s=2′,3′-seco-uridine-3′-phosphorothioate
[0156] a_2N=see Table 11
[0157] a_2Ns=see Table 11
[0158] (invAb)=inverted abasic deoxyribonucleotide-5′-phosphate, see Table 11
[0159] (invAb)s=inverted abasic deoxyribonucleotide-5′-phosphorothioate, see Table 11
[0160] s=phosphorothioate linkage
[0161] p=terminal phosphate (as synthesized)
[0162] vpdN=vinyl phosphonate deoxyribonucleotide
[0163] cPrpa=5′-cyclopropyl phosphonate-2′-O-methyladenosine-3′-phosphate (see Table 11)
[0164] cPrpas=5′-cyclopropyl phosphonate-2′-O-methyladenosine-3′-phosphorothioate (see Table 11)
[0165] cPrpu=5′-cyclopropyl phosphonate-2′-O-methyluridine-3′-phosphate (see Table 11)
[0166] cPrpus=5′-cyclopropyl phosphonate-2′-O-methyluridine-3′-phosphorothioate (see Table 11)
[0167] (Alk-SS-C6)=see Table 11
[0168] (C6-SS-Alk)=see Table 11
[0169] (C6-SS-C6)=see Table 11
[0170] (6-SS-6)=see Table 11
[0171] (C6-SS-Alk-Me)=see Table 11
[0172] (NH2-C6)=see Table 11
[0173] (TriAlk14)=see Table 11
[0174] (TriAlk14)s=see Table 11
[0175] —C6-=see Table 11
[0176] —C6s-=see Table 11
[0177] -L6-C6-=see Table 11
[0178] -L6-C6s-=see Table 11
[0179] Alk-cyHex-=see Table 11
[0180] Alk-cyHexs-=see Table 11
[0181] (TA14)=see Table 11 (structure of (TriAlk14)s after conjugation)
[0182] (TA14)s=see Table 11 (structure of (TriAlk14)s after conjugation)

[0183] As the person of ordinary skill in the art would readily understand, unless otherwise indicated by the sequence (such as, for example, by a phosphorothioate linkage “s”), when present in an oligonucleotide, the nucleotide monomers are mutually linked by 5′-3′-phosphodiester bonds. As the person of ordinary skill in the art would clearly understand, the inclusion of a phosphorothioate linkage as shown in the modified nucleotide sequences disclosed herein replaces the phosphodiester linkage typically present in oligonucleotides. Further, the person of ordinary skill in the art would readily understand that the terminal nucleotide at the 3′ end of a given oligonucleotide sequence would typically have a hydroxyl (—OH) group at the respective 3′ position of the given monomer instead of a phosphate moiety ex vivo. Additionally, for the embodiments disclosed herein, when viewing the respective strand 5′→3′, the inverted abasic residues are inserted such that the 3′ position of the deoxyribose is linked at the 3′ end of the preceding monomer on the respective strand (see, e.g., Table 11). Moreover, as the person of ordinary skill would readily understand and appreciate, while the phosphorothioate chemical structures depicted herein typically show the anion on the sulfur atom, the inventions disclosed herein encompass all phosphorothioate tautomers (e.g., where the sulfur atom has a double-bond and the anion is on an oxygen atom). Unless expressly indicated otherwise herein, such understandings of the person of ordinary skill in the art are used when describing the IAV RNAi agents and compositions of IAV RNAi agents disclosed herein.

[0184] Certain examples of targeting groups and linking groups used with the IAV RNAi agents disclosed herein are included in the chemical structures provided below in Table 11. Each sense strand and/or antisense strand can have any targeting groups or linking groups listed herein, as well as other targeting or linking groups, conjugated to the 5′ and/or 3′ end of the sequence.

TABLE 3A
IAV RNAi agent (targeting M1) Antisense Strand Sequences

| | | SEQ | Underlying Base Sequence (5′ → 3′) | SEQ |
|---|---|---|---|---|
| | | ID | (Shown as an Unmodified Nucleotide | ID |
| AS Strand ID | Modified Antisense Strand (5′ → 3′) | NO. | Sequence) | NO. |
| AM15368-AS | usUfsasCfgUfuucgaCfcUfcGfgUfuasg | 1155 | UUACGUUUCGACCUCGGUUAG | 1590 |
| AM15370-AS | usAfsusGfaUfagaaaGfaAfcGfuAfcgsu | 1156 | UAUGAUAGAAAGAACGUACGU | 1591 |
| AM15372-AS | usUfsgsAfcAfagauuGfgUfcUfuGfucsu | 1157 | UUGACAAGAUUGGUCUUGUCU | 1592 |
| AM15374-AS | asGfsusCfaGfaggugAfcAfaGfaUfugsg | 1158 | AGUCAGAGGUGACAAGAUUGG | 1593 |
| AM15376-AS | usUfsasGfuCfagaggUfgAfcAfaGfausc | 1159 | UUAGUCAGAGGUGACAAGAUC | 1594 |
| AM15378-AS | usCfsusCfuAfuccauGfuUfgUfuCfggsg | 1160 | UCUCUAUCCAUGUUGUUCGGG | 1595 |
| AM15380-AS | asAfscsUfgCfucuauCfcAfuGfuUfgusc | 1161 | AACUGCUCUAUCCAUGUUGUC | 1596 |
| AM15382-AS | usAfsgsUfuGfaauagCfuUfaGfuGfacsa | 1162 | UAGUUGAAUAGCUUAGUGACA | 1597 |
| AM15384-AS | usUfsgsGfcAfagugcAfcCfaGfuUfgasc | 1163 | UUGGCAAGUGCACCAGUUGAC | 1598 |
| AM15386-AS | asAfsasGfcAfgcuucUfgUfgGfuCfacsu | 1164 | AAAGCAGCUUCUGUGGUCACU | 1599 |
| AM15388-AS | usCfscsUfgAfuuaguGfgAfuUfgGfugsg | 1165 | UCCUGAUUAGUGGAUUGGUGG | 1600 |
| AM15390-AS | usUfsasGfgAfugaguCfcCfaAfuAfgusc | 1166 | UUAGGAUGAGUCCCAAUAGUC | 1601 |
| AM15392-AS | usAfscsAfaAfaugacCfaUfcGfuCfaasc | 1167 | UACAAAAUGACCAUCGUCAAC | 1602 |
| AM15394-AS | usGfsasCfaAfaaugaCfcAfuCfgUfcasc | 1168 | UGACAAAAUGACCAUCGUCAC | 1603 |
| AM16677-AS | cPrpusUfsasCfgUfuucgaCfcUfcGfgUfuasg | 1169 | UUACGUUUCGACCUCGGUUAG | 1590 |
| AM16812-AS | cPrpusAfsusGfaUfagaaaGfaAfcGfuAfcgsu | 1170 | UAUGAUAGAAAGAACGUACGU | 1591 |
| AM17566-AS | cPrpusAfscsAfaAfaugacCfaUfcGfuCfaasc | 1171 | UACAAAAUGACCAUCGUCAAC | 1602 |
| AM17568-AS | cPrpusGfsasCfaAfaaugaCfcAfuCfgUfcasc | 1172 | UGACAAAAUGACCAUCGUCAC | 1603 |
| AM17928-AS | cPrpusUfsAfscguuucgaCfcUfcGfguuasg | 1173 | UUACGUUUCGACCUCGGUUAG | 1590 |
| AM17929-AS | cPrpusUfsasCfguuucgaCfcUfcGfguuasg | 1174 | UUACGUUUCGACCUCGGUUAG | 1590 |
| AM17930-AS | cPrpusUfsascGfuuucgaCfcUfcGfguuasg | 1175 | UUACGUUUCGACCUCGGUUAG | 1590 |
| AM17931-AS | cPrpusUfsascguUfucgaCfcUfcGfguuasg | 1176 | UUACGUUUCGACCUCGGUUAG | 1590 |
| AM17933-AS | cPrpusUfsascguuuCfgaCfcUfcGfguuasg | 1177 | UUACGUUUCGACCUCGGUUAG | 1590 |
| AM17934-AS | cPrpusUfsaCfgUfuucgaCfcUfcGfgUfuasg | 1178 | UUACGUUUCGACCUCGGUUAG | 1590 |
| AM18487-AS | cPrpusCfsusCfuAfuccauGfuUfgUfuCfggsg | 1179 | UCUCUAUCCAUGUUGUUCGGG | 1595 |
| AM18489-AS | cPrpasAfscsUfgCfucuauCfcAfuGfuUfgusc | 1180 | AACUGCUCUAUCCAUGUUGUC | 1596 |
| AM18520-AS | cPrpusAfsuGfaUfagaaaGfaAfcGfuAfcsgsu | 1181 | UAUGAUAGAAAGAACGUACGU | 1591 |
| AM18521-AS | cPrpusAfsuGfaUfagaaaGfaAfcGfuAfcgsu | 1182 | UAUGAUAGAAAGAACGUACGU | 1591 |
| AM18523-AS | cPrpusAfsUfsgauagaaaGfaAfcGfuacgsu | 1183 | UAUGAUAGAAAGAACGUACGU | 1591 |
| AM18524-AS | cPrpusAfsusgAfuagaaaGfaAfcGfuacgsu | 1184 | UAUGAUAGAAAGAACGUACGU | 1591 |
| AM18525-AS | cPrpusAfsusgauAfgaaaGfaAfcGfuacgsu | 1185 | UAUGAUAGAAAGAACGUACGU | 1591 |
| AM18526-AS | cPrpusAfsusgauagAfaaGfaAfcGfuacgsu | 1186 | UAUGAUAGAAAGAACGUACGU | 1591 |
| AM19907-AS | cPrpusAfsusGfauagaaaGfaAfcGfuacgsu | 1187 | UAUGAUAGAAAGAACGUACGU | 1591 |
| AM19908-AS | cPrpusAfsUfgauagaaaGfaAfcGfuacgsu | 1188 | UAUGAUAGAAAGAACGUACGU | 1591 |
| AM19909-AS | cPrpusAfsuGfauagaaaGfaAfcGfuacgsu | 1189 | UAUGAUAGAAAGAACGUACGU | 1591 |
| AM19910-AS | cPrpusAfsugAfuagaaaGfaAfcGfuacgsu | 1190 | UAUGAUAGAAAGAACGUACGU | 1591 |
| AM19911-AS | cPrpusAfsugauAfgaaaGfaAfcGfuacgsu | 1191 | UAUGAUAGAAAGAACGUACGU | 1591 |
| AM19912-AS | cPrpusAfsugauagAfaaGfaAfcGfuacgsu | 1192 | UAUGAUAGAAAGAACGUACGU | 1591 |

TABLE 3B
IAV RNAi agent (targeting NS1) Antisense Strand Sequences

| | | SEQ | Underlying Base Sequence (5′ → 3′) | SEQ |
|---|---|---|---|---|
| | | ID | (Shown as an Unmodified Nucleotide | ID |
| AS Strand ID | Modified Antisense Strand (5′ → 3′) | NO. | Sequence) | NO. |
| AM14463-AS | usAfsusCfaAfggaauGfgGfgCfaUfcasc | 1193 | UAUCAAGGAAUGGGGCAUCAC | 1604 |
| AM14465-AS | usGfsasUfcAfaggaaUfgGfgGfcAfucsa | 1194 | UGAUCAAGGAAUGGGGCAUCA | 1605 |
| AM14467-AS | usCfsgsAfuCfaaggaAfuGfgGfgCfausc | 1195 | UCGAUCAAGGAAUGGGGCAUC | 1606 |
| AM14469-AS | usGfscsAfuUfuuugaCfaUfcCfuCfausc | 1196 | UGCAUUUUUGACAUCCUCAUC | 1607 |
| AM14471-AS | usCfsasUfuCfaagucCfuCfcGfaUfgasg | 1197 | UCAUUCAAGUCCUCCGAUGAG | 1608 |
| AM14473-AS | usCfscsAfuUfcaaguCfcUfcCfgAfugsa | 1198 | UCCAUUCAAGUCCUCCGAUGA | 1609 |
| AM14475-AS | usUfscsCfaUfucaagUfcCfuCfcGfausg | 1199 | UUCCAUUCAAGUCCUCCGAUG | 1610 |
| AM14477-AS | usAfsusUfcCfauucaAfgUfcCfuCfcgsa | 1200 | UAUUCCAUUCAAGUCCUCCGA | 1611 |
| AM14479-AS | usCfsasUfuCfcauucAfaGfuCfcUfccsg | 1201 | UCAUUCCAUUCAAGUCCUCCG | 1612 |
| AM14481-AS | usUfscsCfaAfgcgaaUfcUfcUfgUfausc | 1202 | UUCCAAGCGAAUCUCUGUAUC | 1613 |
| AM14695-AS | usCfsasUfgAfgcaugAfaCfcAfgUfcusc | 1203 | UCAUGAGCAUGAACCAGUCUC | 1614 |
| AM14697-AS | asCfsasCfuGfaaguuCfgCfuUfuCfagsu | 1204 | ACACUGAAGUUCGCUUUCAGU | 1615 |
| AM14699-AS | asGfsusGfaAfagcccUfuAfgUfaGfuasc | 1205 | AGUGAAAGCCCUUAGUAGUAC | 1616 |
| AM14701-AS | usAfsgsUfgAfaagccCfuUfaGfuAfgusc | 1206 | UAGUGAAAGCCCUUAGUAGUC | 1617 |
| AM14703-AS | asAfsgsUfaUfguccuGfgAfaGfaGfaasg | 1207 | AAGUAUGUCCUGGAAGAGAAG | 1618 |
| AM14705-AS | usCfscsAfaCfugcauUfuUfuGfaCfausc | 1208 | UCCAACUGCAUUUUUGACAUC | 1619 |
| AM14707-AS | usAfsusGfaGfgacccCfaAfcUfgCfausc | 1209 | UAUGAGGACCCCAACUGCAUC | 1620 |
| AM14709-AS | usUfsgsUfuAfccauuCfcAfuUfcAfagsc | 1210 | UUGUUACCAUUCCAUUCAAGC | 1621 |
| AM14711-AS | usAfsgsAfcUfcgaacCfgUfgUfuAfccsa | 1211 | UAGACUCGAACCGUGUUACCA | 1622 |
| AM14713-AS | asAfsgsGfuCfucccaUfuCfuCfaUfcasc | 1212 | AAGGUCUCCCAUUCUCAUCAC | 1623 |
| AM14715-AS | usAfsgsUfuGfuaaggCfuUfgCfaUfaasc | 1213 | UAGUUGUAAGGCUUGCAUAAC | 1624 |
| AM14717-AS | asUfsasAfgCfugaaaCfgAfgAfaAfgcsu | 1214 | AUAAGCUGAAACGAGAAAGCU | 1625 |
| AM15163-AS | usAfsasCfaAfgagugGfcUfgUfuUfcgsa | 1215 | UAACAAGAGUGGCUGUUUCGA | 1626 |
| AM15165-AS | usCfsasAfgAfuccauUfcCfaCfgAfuusc | 1216 | UCAAGAUCCAUUCCACGAUUC | 1627 |
| AM15167-AS | usUfsgsGfaUfuccucUfuUfcAfaGfausc | 1217 | UUGGAUUCCUCUUUCAAGAUC | 1628 |
| AM15169-AS | asGfsgsUfaCfagaugCfaAfuUfgUfcasc | 1218 | AGGUACAGAUGCAAUUGUCAC | 1629 |
| AM15171-AS | usCfsgsAfaGfuagguAfcAfgAfuGfcasc | 1219 | UCGAAGUAGGUACAGAUGCAC | 1630 |
| AM15173-AS | asUfsgsAfgCfaugaaCfcAfgUfcUfcgsu | 1220 | AUGAGCAUGAACCAGUCUCGU | 1631 |
| AM15175-AS | asAfsasGfaUfuacacUfgAfaGfuUfcgsc | 1221 | AAAGAUUACACUGAAGUUCGC | 1632 |
| AM15177-AS | usUfsasUfcAfaggucUfcUfaAfuCfggsu | 1222 | UUAUCAAGGUCUCUAAUCGGU | 1633 |
| AM15179-AS | asCfsusCfgAfaccguGfuUfaCfcAfuusc | 1223 | ACUCGAACCGUGUUACCAUUC | 1634 |
| AM15181-AS | usAfsgsUfgAfaggucUfcCfcAfuUfcusc | 1224 | UAGUGAAGGUCUCCCAUUCUC | 1635 |
| AM15183-AS | usUfscsGfaAfacuauUfcUfcUfgUfcgsc | 1225 | UUCGAAACUAUUCUCUGUCGC | 1636 |
| AM15185-AS | asAfscsGfaGfaaagcUfcUfuAfuCfucsc | 1226 | AACGAGAAAGCUCUUAUCUCC | 1637 |
| AM15546-AS | usUfscsCfaAfgcgaaUfcUfcUfgUfausg | 1227 | UUCCAAGCGAAUCUCUGUAUG | 1638 |
| AM15547-AS | cPrpusUfscsCfaAfgcgaaUfcUfcUfgUfausc | 1228 | UUCCAAGCGAAUCUCUGUAUC | 1613 |
| AM15548-AS | cPrpusUfscCfaAfgcgaaUfcUfcUfgUfasusc | 1229 | UUCCAAGCGAAUCUCUGUAUC | 1613 |
| AM15549-AS | usUfsCfscaagcgaaUfcUfcUfguausc | 1230 | UUCCAAGCGAAUCUCUGUAUC | 1613 |
| AM15550-AS | usUfscsCfaagcgaaUfcUfcUfguausc | 1231 | UUCCAAGCGAAUCUCUGUAUC | 1613 |
| AM15710-AS | usGfscsAfuuuuugaCfaUfcCfucausc | 1232 | UGCAUUUUUGACAUCCUCAUC | 1607 |
| AM15711-AS | usGfscsauuUfuugaCfaUfcCfucausc | 1233 | UGCAUUUUUGACAUCCUCAUC | 1607 |
| AM15714-AS | cPrpusGfscsauuUfuugaCfaUfcCfucausc | 1234 | UGCAUUUUUGACAUCCUCAUC | 1607 |
| AM15716-AS | usUfsgsUfuaccauuCfcAfuUfcaagsc | 1235 | UUGUUACCAUUCCAUUCAAGC | 1621 |
| AM15717-AS | usUfsgsuuaCfcauuCfcAfuUfcaagsc | 1236 | UUGUUACCAUUCCAUUCAAGC | 1621 |
| AM15720-AS | usUfscsgAfaacuauUfcUfcUfgucgsc | 1237 | UUCGAAACUAUUCUCUGUCGC | 1636 |
| AM15721-AS | usUfscsgaaAfcuauUfcUfcUfgucgsc | 1238 | UUCGAAACUAUUCUCUGUCGC | 1636 |
| AM15725-AS | asUfsasAfgCfugaaaCfgAfgAfaAfgcsc | 1239 | AUAAGCUGAAACGAGAAAGCC | 1639 |
| AM15727-AS | asUfsAfsagcugaaaCfgAfgAfaagcsu | 1240 | AUAAGCUGAAACGAGAAAGCU | 1625 |
| AM15728-AS | asUfsasAfgcugaaaCfgAfgAfaagcsu | 1241 | AUAAGCUGAAACGAGAAAGCU | 1625 |
| AM15729-AS | cPrpasUfsasAfgCfugaaaCfgAfgAfaAfgcsu | 1242 | AUAAGCUGAAACGAGAAAGCU | 1625 |
| AM15730-AS | cPrpasUfsaAfgCfugaaaCfgAfgAfaAfgscsu | 1243 | AUAAGCUGAAACGAGAAAGCU | 1625 |
| AM15872-AS | cPrpusUfsgsUfuAfccauuCfcAfuUfcAfagsc | 1244 | UUGUUACCAUUCCAUUCAAGC | 1621 |
| AM15874-AS | cPrpusUfscsGfaAfacuauUfcUfcUfgUfcgsc | 1245 | UUCGAAACUAUUCUCUGUCGC | 1636 |
| AM15877-AS | cPrpusGfscsAfuUfuuugaCfaUfcCfuCfausc | 1246 | UGCAUUUUUGACAUCCUCAUC | 1607 |
| AM17578-AS | cPrpusAfsusCfaAfggaauGfgGfgCfaUfcasc | 1247 | UAUCAAGGAAUGGGGCAUCAC | 1604 |
| AM17580-AS | cPrpusGfsasUfcAfaggaaUfgGfgGfcAfucsa | 1248 | UGAUCAAGGAAUGGGGCAUCA | 1605 |
| AM17582-AS | cPrpusCfsgsAfuCfaaggaAfuGfgGfgCfausc | 1249 | UCGAUCAAGGAAUGGGGCAUC | 1606 |
| AM17584-AS | cPrpusCfsasUfuCfaagucCfuCfcGfaUfgasg | 1250 | UCAUUCAAGUCCUCCGAUGAG | 1608 |
| AM17586-AS | cPrpusCfscsAfuUfcaaguCfcUfcCfgAfugsa | 1251 | UCCAUUCAAGUCCUCCGAUGA | 1609 |
| AM17588-AS | cPrpusUfscsCfaUfucaagUfcCfuCfcGfausg | 1252 | UUCCAUUCAAGUCCUCCGAUG | 1610 |
| AM17590-AS | cPrpusAfsusUfcCfauucaAfgUfcCfuCfcgsa | 1253 | UAUUCCAUUCAAGUCCUCCGA | 1611 |
| AM17592-AS | cPrpusCfsasUfuCfcauucAfaGfuCfcUfccsg | 1254 | UCAUUCCAUUCAAGUCCUCCG | 1612 |
| AM17594-AS | cPrpasCfsasCfuGfaaguuCfgCfuUfuCfagsu | 1255 | ACACUGAAGUUCGCUUUCAGU | 1615 |
| AM17596-AS | cPrpasAfsgsUfaUfguccuGfgAfaGfaGfaasg | 1256 | AAGUAUGUCCUGGAAGAGAAG | 1618 |
| AM17598-AS | cPrpusCfscsAfaCfugcauUfuUfuGfaCfausc | 1257 | UCCAACUGCAUUUUUGACAUC | 1619 |
| AM17600-AS | cPrpasAfsgsGfuCfucccaUfuCfuCfaUfcasc | 1258 | AAGGUCUCCCAUUCUCAUCAC | 1623 |
| AM18492-AS | cPrpusUfsgsuuaCfcauuCfcAfuUfcaagsc | 1259 | UUGUUACCAUUCCAUUCAAGC | 1621 |
| AM18493-AS | cPrpusUfscsgaaAfcuauUfcUfcUfgucgsc | 1260 | UUCGAAACUAUUCUCUGUCGC | 1636 |
| AM19062-AS | cPrpusUfsgsGfaUfuccucUfuUfcAfaGfausc | 1261 | UUGGAUUCCUCUUUCAAGAUC | 1628 |
| AM19064-AS | cPrpasUfsgsAfgCfaugaaCfcAfgUfcUfcgsu | 1262 | AUGAGCAUGAACCAGUCUCGU | 1631 |
| AM19066-AS | cPrpasAfsasGfaUfuacacUfgAfaGfuUfcgsc | 1263 | AAAGAUUACACUGAAGUUCGC | 1632 |
| AM19068-AS | cPrpusUfsasUfcAfaggucUfcUfaAfuCfggsu | 1264 | UUAUCAAGGUCUCUAAUCGGU | 1633 |
| AM19070-AS | cPrpasGfsusGfaAfagcccUfuAfgUfaGfuasc | 1265 | AGUGAAAGCCCUUAGUAGUAC | 1616 |
| AM19072-AS | cPrpasCfsusCfgAfaccguGfuUfaCfcAfuusc | 1266 | ACUCGAACCGUGUUACCAUUC | 1634 |
| AM19074-AS | cPrpusAfsgsAfcUfcgaacCfgUfgUfuAfccsa | 1267 | UAGACUCGAACCGUGUUACCA | 1622 |
| AM19076-AS | cPrpusAfsgsUfuGfuaaggCfuUfgCfaUfaasc | 1268 | UAGUUGUAAGGCUUGCAUAAC | 1624 |
| AM19078-AS | cPrpasAfscsGfaGfaaagcUfcUfuAfuCfucsc | 1269 | AACGAGAAAGCUCUUAUCUCC | 1637 |

TABLE 3C
IAV RNAi agent (targeting PB1) Antisense Strand Sequences

| | | SEQ | Underlying Base Sequence (5′ → 3′) | SEQ |
|---|---|---|---|---|
| | | ID | (Shown as an Unmodified Nucleotide | ID |
| AS Strand ID | Modified Antisense Strand (5′ → 3′) | NO. | Sequence) | NO. |
| AM15187-AS | usAfsgsUfaUfaagggAfaUfgUfgGfugsc | 1270 | UAGUAUAAGGGAAUGUGGUGC | 1640 |
| AM15189-AS | usAfsgsUfaUfuggugUfgUfuCfuGfuusc | 1271 | UAGUAUUGGUGUGUUCUGUUC | 1641 |
| AM15191-AS | usUfscsCfaUfuguuuCfaAfgGfcAfugsa | 1272 | UUCCAUUGUUUCAAGGCAUGA | 1642 |
| AM15193-AS | asAfsgsAfcUfucuauGfgUfgUfuGfgcsc | 1273 | AAGACUUCUAUGGUGUUGGCC | 1643 |
| AM15195-AS | usGfsgsUfcAfuguugUfcUfcUfuAfcusc | 1274 | UGGUCAUGUUGUCUCUUACUC | 1644 |
| AM15197-AS | usCfsasAfgCfuuuucGfcAfaAfuGfcusc | 1275 | UCAAGCUUUUCGCAAAUGCUC | 1645 |
| AM15199-AS | asCfsusUfaGfuguugUfcCfcCfaGfugsa | 1276 | ACUUAGUGUUGUCCCCAGUGA | 1646 |
| AM15201-AS | usCfscsUfaGfucuugCfcAfuUfuUfgusc | 1277 | UCCUAGUCUUGCCAUUUUGUC | 1647 |
| AM15203-AS | usUfsasGfcAfuguugAfaCfaUfgCfccsa | 1278 | UUAGCAUGUUGAACAUGCCCA | 1648 |
| AM15205-AS | usGfsusAfgAfaucugUfcCfaCfuCfcusg | 1279 | UGUAGAAUCUGUCCACUCCUG | 1649 |
| AM15207-AS | usCfsusAfaAfauuagCfcAfcAfaAfucsc | 1280 | UCUAAAAUUAGCCACAAAUCC | 1650 |
| AM15209-AS | usGfsasUfgAfacaauUfgAfaGfaGfccsa | 1281 | UGAUGAACAAUUGAAGAGCCA | 1651 |
| AM15211-AS | asUfsasAfgUfuugguCfcUfcCfaUfcusg | 1282 | AUAAGUUUGGUCCUCCAUCUG | 1652 |
| AM15213-AS | usGfsgsUfaCfaucugUfuCfaUfcCfucsa | 1283 | UGGUACAUCUGUUCAUCCUCA | 1653 |
| AM15215-AS | usCfsasCfcAfugcuaGfaAfaUfuCfcasc | 1284 | UCACCAUGCUAGAAAUUCCAC | 1654 |
| AM15217-AS | usUfsusCfaAfuggugGfaAfcAfgAfucsu | 1285 | UUUCAAUGGUGGAACAGAUCU | 1655 |
| AM15219-AS | usGfsasAfuGfuggugCfuUfaUfgGfcasu | 1286 | UGAAUGUGGUGCUUAUGGCAU | 1656 |
| AM15221-AS | usAfscsGfaAfaccucUfaAfuCfuGfcasc | 1287 | UACGAAACCUCUAAUCUGCAC | 1657 |
| AM15223-AS | asGfsasCfuGfuucaaGfcUfuUfuCfgcsa | 1288 | AGACUGUUCAAGCUUUUCGCA | 1658 |
| AM15225-AS | usCfsasUfcAfucaucCfcAfgGfaCfucsa | 1289 | UCAUCAUCAUCCCAGGACUCA | 1659 |
| AM15227-AS | usCfsasAfgAfuucagUfaUfcGfaGfacsu | 1290 | UCAAGAUUCAGUAUCGAGACU | 1660 |
| AM15229-AS | usCfsasUfgUfuguucUfuUfaUfcAfcusg | 1291 | UCAUGUUGUUCUUUAUCACUG | 1661 |
| AM15231-AS | usAfsgsAfaCfucuucUfuUfcUfuGfausc | 1292 | UAGAACUCUUCUUUCUUGAUC | 1662 |
| AM15233-AS | usAfsasCfaGfaucuuCfaUfgAfuCfucsc | 1293 | UAACAGAUCUUCAUGAUCUCC | 1663 |
| AM15235-AS | usUfsgsAfgUfucuucAfaUfgGfuGfgasc | 1294 | UUGAGUUCUUCAAUGGUGGAC | 1664 |
| AM16046-AS | cPrpusUfscsCfaUfuguuuCfaAfgGfcAfugsa | 1295 | UUCCAUUGUUUCAAGGCAUGA | 1642 |
| AM16048-AS | cPrpasGfsasCfuGfuucaaGfcUfuUfuCfgcsa | 1296 | AGACUGUUCAAGCUUUUCGCA | 1658 |
| AM16050-AS | cPrpusAfscsGfaAfaccucUfaAfuCfuGfcasc | 1297 | UACGAAACCUCUAAUCUGCAC | 1657 |
| AM16683-AS | cPrpusUfsusCfaAfuggugGfaAfcAfgAfucsu | 1298 | UUUCAAUGGUGGAACAGAUCU | 1655 |
| AM17574-AS | cPrpusAfsasCfaGfaucuuCfaUfgAfuCfucsc | 1299 | UAACAGAUCUUCAUGAUCUCC | 1663 |
| AM18497-AS | cPrpusAfsgsUfaUfuggugUfgUfuCfuGfuusc | 1300 | UAGUAUUGGUGUGUUCUGUUC | 1641 |
| AM19084-AS | cPrpusGfsasUfgAfacaauUfgAfaGfaGfccsa | 1301 | UGAUGAACAAUUGAAGAGCCA | 1665 |

TABLE 3D
IAV RNAi agent (targeting PB2) Antisense Strand Sequences

| | | SEQ | Underlying Base Sequence (5′ → 3′) | SEQ |
|---|---|---|---|---|
| | | ID | (Shown as an Unmodified Nucleotide | ID |
| AS Strand ID | Modified Antisense Strand (5′ → 3′) | NO. | Sequence) | NO. |
| AM15253-AS | usGfsgsUfcUfuagugAfgUfaUfcUfcgsc | 1302 | UGGUCUUAGUGAGUAUCUCGC | 1665 |
| AM15255-AS | usCfsasUfgUfuucaaCfcUfuUfcGfacsc | 1303 | UCAUGUUUCAACCUUUCGACC | 1666 |
| AM15257-AS | usUfsasGfcAfuguacGfcCfaCfcAfucsa | 1304 | UUAGCAUGUACGCCACCAUCA | 1667 |
| AM15259-AS | usUfsasCfuAfuguuuCfuAfgCfaGfcgsa | 1305 | UUACUAUGUUUCUAGCAGCGA | 1668 |
| AM15261-AS | usAfscsUfgAfugaucCfgCfuUfgUfccsu | 1306 | UACUGAUGAUCCGCUUGUCCU | 1669 |
| AM15263-AS | usCfsusUfgAfucaugCfaAfuCfcUfccsu | 1307 | UCUUGAUCAUGCAAUCCUCCU | 1670 |
| AM15265-AS | usGfsusCfaAfuacucAfcUfaCfcAfcusc | 1308 | UGUCAAUACUCACUACCACUC | 1671 |
| AM15267-AS | asGfsasCfaAfuaguaCfgUfuCfcCfucsu | 1309 | AGACAAUAGUACGUUCCCUCU | 1672 |
| AM15269-AS | usCfsasUfuGfaucucCfcAfcAfuCfausc | 1310 | UCAUUGAUCUCCCACAUCAUC | 1673 |
| AM15271-AS | usGfsgsAfaCfaguguCfcUfuAfcGfaasc | 1311 | UGGAACAGUGUCCUUACGAAC | 1674 |
| AM15273-AS | usUfsgsUfuGfuaauuGfaAfuAfcUfggsa | 1312 | UUGUUGUAAUUGAAUACUGGA | 1675 |
| AM15275-AS | usAfsgsUfaAfguaugCfuAfgAfgUfccsc | 1313 | UAGUAAGUAUGCUAGAGUCCC | 1676 |
| AM16685-AS | cPrpusAfsgsUfaAfguaugCfuAfgAfgUfccsc | 1314 | UAGUAAGUAUGCUAGAGUCCC | 1676 |
| AM17367-AS | cPrpusGfsgsUfcUfuagugAfgUfaUfcUfcgsc | 1315 | UGGUCUUAGUGAGUAUCUCGC | 1665 |
| AM17369-AS | cPrpusCfsasUfgUfuucaaCfcUfuUfcGfacsc | 1316 | UCAUGUUUCAACCUUUCGACC | 1666 |
| AM17371-AS | cPrpusUfsasGfcAfuguacGfcCfaCfcAfucsa | 1317 | UUAGCAUGUACGCCACCAUCA | 1667 |
| AM17576-AS | cPrpusAfscsUfgAfugaucCfgCfuUfgUfccsu | 1318 | UACUGAUGAUCCGCUUGUCCU | 1669 |
| AM18499-AS | cPrpusUfsasCfuAfuguuuCfuAfgCfaGfcgsa | 1319 | UUACUAUGUUUCUAGCAGCGA | 1668 |
| AM19086-AS | cPrpusUfsgsUfuGfuaauuGfaAfuAfcUfggsa | 1320 | UUGUUGUAAUUGAAUACUGGA | 1675 |

TABLE 3E
IAV RNAi agent (targeting NP) Antisense Strand Sequences

| | | SEQ | Underlying Base Sequence (5′ → 3′) | SEQ |
|---|---|---|---|---|
| | | ID | (Shown as an Unmodified Nucleotide | ID |
| AS Strand ID | Modified Antisense Strand (5′ → 3′) | NO. | Sequence) | NO. |
| AM15336-AS | usAfscsCfaAfucauuCfuUfcCfgAfcasg | 1321 | UACCAAUCAUUCUUCCGACAG | 1677 |
| AM15338-AS | asUfsgsCfuAfuucugGfaUfuAfgUfcgsu | 1322 | AUGCUAUUCUGGAUUAGUCGU | 1678 |
| AM15340-AS | usCfsasGfaAfagcacCfaUfcCfuCfucsu | 1323 | UCAGAAAGCACCAUCCUCUCU | 1679 |
| AM15342-AS | usCfscsAfaAfucaugAfuAfuGfaGfuasc | 1324 | UCCAAAUCAUGAUAUGAGUAC | 1680 |
| AM15344-AS | usUfsgsAfuAfuguggCfaUfcAfuUfcasg | 1325 | UUGAUAUGUGGCAUCAUUCAG | 1681 |
| AM15346-AS | usGfsusUfgAfaccuuGfcAfuUfaGfagsc | 1326 | UGUUGAACCUUGCAUUAGAGC | 1682 |
| AM15348-AS | usCfsasCfgUfuugauCfaUfuCfuGfausc | 1327 | UCACGUUUGAUCAUUCUGAUC | 1683 |
| AM15350-AS | usCfsasGfaAfauuucGfgUfcAfuUfgasc | 1328 | UCAGAAAUUUCGGUCAUUGAC | 1684 |
| AM15352-AS | usCfsusUfuGfaggauAfuUfgCfaCfausc | 1329 | UCUUUGAGGAUAUUGCACAUC | 1685 |
| AM15354-AS | usUfscsAfgAfaugagUfgCfuGfaCfcgsu | 1330 | UUCAGAAUGAGUGCUGACCGU | 1686 |
| AM15356-AS | usGfsasUfuUfaugugCfaAfcUfgAfucsc | 1331 | UGAUUUAUGUGCAACUGAUCC | 1687 |
| AM15358-AS | usAfscsCfaAfuugacUfcUfuGfuGfagsc | 1332 | UACCAAUUGACUCUUGUGAGC | 1688 |
| AM15360-AS | usUfscsUfuAfugaaaCfuUfgAfuAfcusc | 1333 | UUCUUAUGAAACUUGAUACUC | 1689 |
| AM15362-AS | usGfsasGfaAfuguagGfcUfgCfaCfacsu | 1334 | UGAGAAUGUAGGCUGCACACU | 1690 |
| AM15364-AS | usUfsasCfuCfaugucAfaAfgGfaAfggsc | 1335 | UUACUCAUGUCAAAGGAAGGC | 1691 |
| AM15366-AS | asGfsasAfaUfaagacCfcUfuCfaUfuasc | 1336 | AGAAAUAAGACCCUUCAUUAC | 1692 |
| AM16687-AS | cPrpusUfsasCfuCfaugucAfaAfgGfaAfggsc | 1337 | UUACUCAUGUCAAAGGAAGGC | 1691 |
| AM17373-AS | cPrpusGfsusUfgAfaccuuGfcAfuUfaGfagsc | 1338 | UGUUGAACCUUGCAUUAGAGC | 1682 |
| AM17375-AS | cPrpasUfsgsCfuAfuucugGfaUfuAfgUfcgsu | 1339 | AUGCUAUUCUGGAUUAGUCGU | 1678 |
| AM17570-AS | cPrpusCfsasCfgUfuugauCfaUfuCfuGfausc | 1340 | UCACGUUUGAUCAUUCUGAUC | 1683 |
| AM18491-AS | cPrpusAfscsCfaAfucauuCfuUfcCfgAfcasg | 1341 | UACCAAUCAUUCUUCCGACAG | 1677 |
| AM19052-AS | cPrpusCfsasGfaAfagcacCfaUfcCfuCfucsu | 1342 | UCAGAAAGCACCAUCCUCUCU | 1679 |
| AM19054-AS | cPrpusUfsgsAfuAfuguggCfaUfcAfuUfcasg | 1343 | UUGAUAUGUGGCAUCAUUCAG | 1681 |
| AM19056-AS | cPrpusUfscsAfgAfaugagUfgCfuGfaCfcgsu | 1344 | UUCAGAAUGAGUGCUGACCGU | 1686 |
| AM19058-AS | cPrpusAfscsCfaAfuugacUfcUfuGfuGfagsc | 1345 | UACCAAUUGACUCUUGUGAGC | 1688 |
| AM19060-AS | cPrpasGfsasAfaUfaagacCfcUfuCfaUfuasc | 1346 | AGAAAUAAGACCCUUCAUUAC | 1692 |

TABLE 3F
IAV RNAi agent (targeting PA) Antisense Strand Sequences

| | | SEQ | Underlying Base Sequence (5′ → 3′) | SEQ |
|---|---|---|---|---|
| | | ID | (Shown as an Unmodified Nucleotide | ID |
| AS Strand ID | Modified Antisense Strand (5′ → 3′) | NO. | Sequence) | NO. |
| AM15298-AS | usAfsasGfcAfuugucGfcAfcAfaAfgusc | 1347 | UAAGCAUUGUCGCACAAAGUC | 1693 |
| AM15300-AS | usGfsasAfaUfggaaaUfcCfgAfaUfacsc | 1348 | UGAAAUGGAAAUCCGAAUACC | 1694 |
| AM15302-AS | usCfsasUfgAfuucggUfcUfcUfuCfcusu | 1349 | UCAUGAUUCGGUCUCUUCCUU | 1695 |
| AM15304-AS | usGfsasAfa AfgccuaGfuUfuUfgAfuusc | 1350 | UGAAAAGCCUAGUUUUGAUUC | 1696 |
| AM15306-AS | usAfscsGfaAfaggaaUfcCfcAfuAfgasc | 1351 | UACGAAAGGAAUCCCAUAGAC | 1697 |
| AM15308-AS | usUfsusCfaAfuugucUfcUfuCfgCfcusc | 1352 | UUUCAAUUGUCUCUUCGCCUC | 1698 |
| AM15310-AS | usUfscsGfaAfuccauCfuAfcAfuAfggsc | 1353 | UUCGAAUCCAUCUACAUAGGC | 1699 |
| AM15312-AS | usGfsasCfaUfuugggAfaAfgCfuUfgcsc | 1354 | UGACAUUUGGGAAAGCUUGCC | 1700 |
| AM15314-AS | usUfsusGfaUfugcauCfaUfaUfaGfugsg | 1355 | UUUGAUUGCAUCAUAUAGUGG | 1701 |
| AM15316-AS | asAfsgsGfuCfuccaaCfaUfcUfuUfgcsa | 1356 | AAGGUCUCCAACAUCUUUGCA | 1702 |
| AM15318-AS | usCfsasUfcAfaguucUfaUfcCfaGfcusu | 1357 | UCAUCAAGUUCUAUCCAGCUU | 1703 |
| AM15320-AS | asCfsasUfuUfgcuuaUfcAfuUfgGfgasu | 1358 | ACAUUUGCUUAUCAUUGGGAU | 1704 |
| AM15322-AS | usCfsasUfuAfaucagGfcAfcUfcCfucsg | 1359 | UCAUUAAUCAGGCACUCCUCG | 1705 |
| AM16679-AS | cPrpusAfsasGfcAfuugucGfcAfcAfaAfgusc | 1360 | UAAGCAUUGUCGCACAAAGUC | 1693 |
| AM16681-AS | cPrpusUfsusGfaUfugcauCfaUfaUfaGfugsg | 1361 | UUUGAUUGCAUCAUAUAGUGG | 1701 |
| AM16808-AS | cPrpusGfsasAfaAfgccuaGfuUfuUfgAfuusc | 1362 | UGAAAAGCCUAGUUUUGAUUC | 1696 |
| AM16810-AS | cPrpasAfsgsGfuCfuccaaCfaUfcUfuUfgcsa | 1363 | AAGGUCUCCAACAUCUUUGCA | 1702 |
| AM17572-AS | cPrpusCfsasUfuAfaucagGfcAfcUfcCfucsg | 1364 | UCAUUAAUCAGGCACUCCUCG | 1705 |
| AM18495-AS | cPrpusGfsasAfaUfggaaaUfcCfgAfaUfacsc | 1365 | UGAAAUGGAAAUCCGAAUACC | 1694 |
| AM19080-AS | cPrpusUfscsGfaAfuccauCfuAfcAfuAfggsc | 1366 | UUCGAAUCCAUCUACAUAGGC | 1699 |
| AM19082-AS | cPrpasCfsasUfuUfgcuuaUfcAfuUfgGfgasu | 1367 | ACAUUUGCUUAUCAUUGGGAU | 1704 |

TABLE 4A
IAV RNAi Agent (targeting M1) Sense Strand Sequences (Shown Without Linkers, Conjugates, or
Capping Moieties.)

| | | SEQ | Underlying Base Sequence (5′ → 3′) | SEQ |
|---|---|---|---|---|
| | | ID | (Shown as an Unmodified Nucleotide | ID |
| Strand ID | Modified Antisense Strand (5′ → 3′) | NO. | Sequence) | NO. |
| AM16676-SS-NL | csuaaccgaGfGfUfcgaaacguaa | 1368 | CUAACCGAGGUCGAAACGUAA | 1706 |
| AM16811-SS-NL | ascguacguUfCfUfuucuaucaua | 1369 | ACGUACGUUCUUUCUAUCAUA | 1707 |
| AM17565-SS-NL | gsuugacgaUfGfGfucauuuugua | 1370 | GUUGACGAUGGUCAUUUUGUA | 1708 |
| AM17567-SS-NL | gsugacgauGfGfUfcauuuuguca | 1371 | GUGACGAUGGUCAUUUUGUCA | 1709 |
| AM17855-SS-NL | csuaaccgaGfGfUfcgaaacguaa | 1372 | CUAACCGAGGUCGAAACGUAA | 1706 |
| AM17927-SS-NL | csuaaccgaGfgUfcGfaaacguaa | 1373 | CUAACCGAGGUCGAAACGUAA | 1706 |
| AM17932-SS-NL | csuaaccgaGfgUfcgaaacguaa | 1374 | CUAACCGAGGUCGAAACGUAA | 1706 |
| AM18486-SS-NL | csccgaacaAfCfAfuggauagaga | 1375 | CCCGAACAACAUGGAUAGAGA | 1710 |
| AM18488-SS-NL | gsacaacauGfGfAfuagaicaguu | 1376 | GACAACAUGGAUAGAICAGUU | 1711 |
| AM18519-SS-NL | a_2NscguacguUfCfUfuucuaucaua | 1377 | (A^{2N})CGUACGUUCUUUCUAUCAUA | 1770 |
| AM18522-SS-NL | ascguacguUfcUfuUfcuaucaua | 1378 | ACGUACGUUCUUUCUAUCAUA | 1707 |
| AM18527-SS-NL | ascguacguUfcUfUfucuaucaua | 1379 | ACGUACGUUCUUUCUAUCAUA | 1707 |

a_2N = 2-aminoadenosine nucleotide; I = hypoxanthine (inosine) nucleotide

TABLE 4B
IAV RNAi Agent (targeting NS1) Sense Strand Sequences (Shown Without Linkers, Conjugates, or
Capping Moieties.)

| | | SEQ | Underlying Base Sequence (5′ → 3′) | SEQ |
|---|---|---|---|---|
| | | ID | (Shown as an Unmodified Nucleotide | ID |
| Strand ID | Modified Antisense Strand (5′ → 3′) | NO. | Sequence) | NO. |
| AM15869-SS-NL | gsauacagaGfAfUfucgcuuigaa | 1380 | GAUACAGAGAUUCGCUUIGAA | 1712 |
| AM15870-SS-NL | asgcuuucuCfGfUfuucagcuuau | 1381 | AGCUUUCUCGUUUCAGCUUAU | 1713 |
| AM15871-SS-NL | gscuugaauGfGfAfaugguaacaa | 1382 | GCUUGAAUGGAAUGGUAACAA | 1714 |
| AM15873-SS-NL | gscgacagaGfAfAfuaguuucgaa | 1383 | GCGACAGAGAAUAGUUUCGAA | 1715 |
| AM15876-SS-NL | gsaugaggaUfGfUfcaaaaaugca | 1384 | GAUGAGGAUGUCAAAAAUGCA | 1716 |
| AM16806-SS-NL | gsaugaggaUfgUfcAfaaaaugca | 1385 | GAUGAGGAUGUCAAAAAUGCA | 1716 |
| AM17577-SS-NL | gsugaugccCfCfAfuuccuugaua | 1386 | GUGAUGCCCCAUUCCUUGAUA | 1717 |
| AM17579-SS-NL | usgaugcccCfAfUfuccuugauca | 1387 | UGAUGCCCCAUUCCUUGAUCA | 1718 |
| AM17581-SS-NL | gsaugccccAfUfUfccuuiaucga | 1388 | GAUGCCCCAUUCCUUIAUCGA | 1719 |
| AM17583-SS-NL | csucaucggAfGfGfacuugaauga | 1389 | CUCAUCGGAGGACUUGAAUGA | 1720 |
| AM17585-SS-NL | uscaucggaGfGfAfcuugaauiga | 1390 | UCAUCGGAGGACUUGAAUIGA | 1721 |
| AM17587-SS-NL | csaucggagGfAfCfuugaauggaa | 1391 | CAUCGGAGGACUUGAAUGGAA | 1722 |
| AM17589-SS-NL | uscggaggaCfUfUfgaauggaaua | 1392 | UCGGAGGACUUGAAUGGAAUA | 1723 |
| AM17591-SS-NL | csggaggacUfUfGfaaugiaauga | 1393 | CGGAGGACUUGAAUGIAAUGA | 1724 |
| AM17593-SS-NL | ascugaaagCfGfAfacuucaiugu | 1394 | ACUGAAAGCGAACUUCAIUGU | 1725 |
| AM17595-SS-NL | csuucucuuCfCfAfggacauacuu | 1395 | CUUCUCUUCCAGGACAUACUU | 1726 |
| AM17597-SS-NL | gsaugucaaAfAfAfugcaiuugga | 1396 | GAUGUCAAAAAUGCAIUUGGA | 1727 |
| AM17599-SS-NL | gsugaugagAfAfUfgggaiaccuu | 1397 | GUGAUGAGAAUGGGAIACCUU | 1728 |
| AM19061-SS-NL | gsaucuugaAfAfGfaggaauccaa | 1398 | GAUCUUGAAAGAGGAAUCCAA | 1729 |
| AM19063-SS-NL | ascgagacuGfGfUfucauicucau | 1399 | ACGAGACUGGUUCAUICUCAU | 1730 |
| AM19065-SS-NL | gscgaacuuCfAfGfuguaaucuuu | 1400 | GCGAACUUCAGUGUAAUCUUU | 1731 |
| AM19067-SS-NL | asccgauuaGfAfGfaccuugauaa | 1401 | ACCGAUUAGAGACCUUGAUAA | 1732 |
| AM19069-SS-NL | gsuacuacuAfAfGfggcuuucacu | 1402 | GUACUACUAAGGGCUUUCACU | 1733 |
| AM19071-SS-NL | gsaaugguaAfCfAfcgguuciagu | 1403 | GAAUGGUAACACGGUUCIAGU | 1734 |
| AM19073-SS-NL | usgguaacaCfGfGfuucgaiucua | 1404 | UGGUAACACGGUUCGAIUCUA | 1735 |
| AM19075-SS-NL | gsuuaugcaAfGfCfcuuacaacua | 1405 | GUUAUGCAAGCCUUACAACUA | 1736 |
| AM19077-SS-NL | gsgagauaaGfAfGfcuuucuciuu | 1406 | GGAGAUAAGAGCUUUCUCIUU | 1737 |

a_2N = 2-aminoadenosine nucleotide; I = hypoxanthine (inosine) nucleotide

TABLE 4C
IAV RNAi Agent (targeting PB1) Sense Strand Sequences
(Shown Without Linkers, Conjugates, or Capping Moieties.)

| | | | Underlying Base | |
|---|---|---|---|---|
| | | SEQ | Sequence (5′ → 3′) | SEQ |
| | Modified Sense | ID | (Shown as an Unmodified | ID |
| Strand ID | Strand (5′ → 3′) | NO. | Nucleotide Sequence) | NO. |
| AM16045-SS-NL | uscaugccuUfGfAfaacaauggaa | 1407 | UCAUGCCUUGAAACAAUGGAA | 1738 |
| AM16047-SS-NL | usgcgaaaaGfCfUfugaacaiucu | 1408 | UGCGAAAAGCUUGAACAIUCU | 1739 |
| AM16049-SS-NL | gsugcagauUfAfGfagguuucgua | 1409 | GUGCAGAUUAGAGGUUUCGUA | 1740 |
| AM16682-SS-NL | asgaucuguUfCfCfaccauugaaa | 1410 | AGAUCUGUUCCACCAUUGAAA | 1741 |
| AM17573-SS-NL | gsgagaucaUfGfAfagaucuguua | 1411 | GGAGAUCAUGAAGAUCUGUUA | 1742 |
| AM17856-SS-NL | asgaucuguUfCfCfaccauugaaa | 1412 | AGAUCUGUUCCACCAUUGAAA | 1741 |
| AM18496-SS-NL | gsaacagaaCfAfCfaccaauacua | 1413 | GAACAGAACACACCAAUACUA | 1743 |
| AM19083-SS-NL | usggcucuuCfAfAfuuguucauca | 1414 | UGGCUCUUCAAUUGUUCAUCA | 1744 |

a_2N = 2-aminoadenosine nucleotide;
I = hypoxanthine (inosine) nucleotide

TABLE 4D
IAV RNAi Agent (targeting PB2) Sense Strand Sequences
(Shown Without Linkers, Conjugates, or Capping Moieties.)

| | | | Underlying Base | |
|---|---|---|---|---|
| | | SEQ | Sequence (5′ → 3′) | SEQ |
| | Modified Sense | ID | (Shown as an Unmodified | ID |
| Strand ID | Strand (5′ → 3′) | NO. | Nucleotide Sequence) | NO. |
| AM16684-SS-NL | gsggacucuAfGfCfauacuuacua | 1415 | GGGACUCUAGCAUACUUACUA | 1745 |
| AM17366-SS-NL | gscgagauaCfUfCfacuaaiacca | 1416 | GCGAGAUACUCACUAAIACCA | 1746 |
| AM17368-SS-NL | gsgucgaaaGfGfUfugaaacauga | 1417 | GGUCGAAAGGUUGAAACAUGA | 1747 |
| AM17370-SS-NL | usgauggugGfCfGfuacaugcuaa | 1418 | UGAUGGUGGCGUACAUGCUAA | 1748 |
| AM17575-SS-NL | asggacaagCfGfGfaucaucagua | 1419 | AGGACAAGCGGAUCAUCAGUA | 1749 |
| AM17857-SS-NL | gsggacucuAfGfCfauacuuacua | 1420 | GGGACUCUAGCAUACUUACUA | 1745 |
| AM18498-SS-NL | uscgcugcuAfGfAfaacauaguaa | 1421 | UCGCUGCUAGAAACAUAGUAA | 1750 |
| AM19085-SS-NL | usccaguauUfCfAfauuacaacaa | 1422 | UCCAGUAUUCAAUUACAACAA | 1751 |

a_2N = 2-aminoadenosine nucleotide;
I = hypoxanthine (inosine) nucleotide

TABLE 4E
IAV RNAi Agent (targeting NP) Sense Strand Sequences
(Shown Without Linkers, Conjugates, or Capping Moieties.)

| | | | Underlying Base | |
|---|---|---|---|---|
| | | SEQ | Sequence (5′ → 3′) | SEQ |
| | Modified Sense | ID | (Shown as an Unmodified | ID |
| Strand ID | Strand (5′ → 3′) | NO. | Nucleotide Sequence) | NO. |
| AM16686-SS-NL | gsccuuccuUfUfGfacaugaguaa | 1423 | GCCUUCCUUUGACAUGAGUAA | 1752 |
| AM17372-SS-NL | gscucuaauGfCfAfagguucaaca | 1424 | GCUCUAAUGCAAGGUUCAACA | 1753 |
| AM17374-SS-NL | ascgacuaaUfCfCfagaauagcau | 1425 | ACGACUAAUCCAGAAUAGCAU | 1754 |
| AM17569-SS-NL | gsaucagaaUfGfAfucaaaciuga | 1426 | GAUCAGAAUGAUCAAACIUGA | 1755 |
| AM17858-SS-NL | gsccuuccuUfUfGfacaugaguaa | 1427 | GCCUUCCUUUGACAUGAGUAA | 1752 |
| AM18490-SS-NL | csugucggaAfGfAfaugauuggua | 1428 | CUGUCGGAAGAAUGAUUGGUA | 1756 |
| AM19051-SS-NL | asgagaggaUfGfGfugcuuucuga | 1429 | AGAGAGGAUGGUGCUUUCUGA | 1757 |
| AM19053-SS-NL | csugaaugaUfGfCfcacauaucaa | 1430 | CUGAAUGAUGCCACAUAUCAA | 1758 |
| AM19055-SS-NL | ascggucagCfAfCfucauucugaa | 1431 | ACGGUCAGCACUCAUUCUGAA | 1759 |
| AM19057-SS-NL | gscucacaaGfAfGfucaauuggua | 1432 | GCUCACAAGAGUCAAUUGGUA | 1760 |
| AM19059-SS-NL | gsuaaugaaGfGfGfucuuauuucu | 1433 | GUAAUGAAGGGUCUUAUUUCU | 1761 |

a_2N = 2-aminoadenosine nucleotide;
I = hypoxanthine (inosine) nucleotide

TABLE 4F
IAV RNAi Agent (targeting PA) Sense Strand Sequences
(Shown Without Linkers, Conjugates, or Capping Moieties.)

| | | | Underlying Base | |
|---|---|---|---|---|
| | | SEQ | Sequence (5′ → 3′) | SEQ |
| | Modified Sense | ID | (Shown as an Unmodified | ID |
| Strand ID | Strand (5′ → 3′) | NO. | Nucleotide Sequence) | NO. |
| AM16678-SS-NL | gsacuuuguGfCfGfacaaugcuua | 1434 | GACUUUGUGCGACAAUGCUUA | 1762 |
| AM16680-SS-NL | cscacuauaUfGfAfugcaaucaaa | 1435 | CCACUAUAUGAUGCAAUCAAA | 1763 |
| AM16807-SS-NL | gsa_2NaucaaaAfCfUfaggcuuuuca | 1436 | G(A^{2N})AUCAAAACUAGGCUUUUCA | 1771 |
| AM16809-SS-NL | usgcaaagaUfGfUfuggaiaccuu | 1437 | UGCAAAGAUGUUGGAIACCUU | 1765 |
| AM17571-SS-NL | csgaggaguGfCfCfugauuaauga | 1438 | CGAGGAGUGCCUGAUUAAUGA | 1766 |
| AM17859-SS-NL | gsacuuuguGfCfGfacaaugcuua | 1439 | GACUUUGUGCGACAAUGCUUA | 1762 |
| AM17860-SS-NL | cscacuauaUfGfAfugcaaucaaa | 1440 | CCACUAUAUGAUGCAAUCAAA | 1763 |
| AM18494-SS-NL | gsguauucgGfAfUfuuccauuuca | 1441 | GGUAUUCGGAUUUCCAUUUCA | 1767 |
| AM19079-SS-NL | gsccuauguAfGfAfuggauucgaa | 1442 | GCCUAUGUAGAUGGAUUCGAA | 1768 |
| AM19081-SS-NL | asucccaauGfa_2NUfaagcaaaugu | 1443 | AUCCCAAUG(A^{2N})UAAGCAAAUGU | 1772 |

a_2N = 2-aminoadenosine nucleotide;
I = hypoxanthine (inosine) nucleotide

TABLE 5A
IAV RNAi Agent (targeting M1) Sense Strand Sequences (Shown With (TriAlk14)
Linker or Targeting Ligand (see Table 11 for structure information.))

| | | | Underlying Base | |
|---|---|---|---|---|
| | | SEQ | Sequence (5′ → 3′) | SEQ |
| | | ID | (Shown as an Unmodified | ID |
| Strand ID | Modified Sense Strand (5′ → 3′) | NO. | Nucleotide Sequence) | NO. |
| AM16676-SS | (TriAlk14)csuaaccgaGfGfUfcgaaacguaas(invAb) | 1444 | CUAACCGAGGUCGAAACGUAA | 1706 |
| AM16811-SS | (TriAlk14)ascguacguUfCfUfuucuaucauas(invAb) | 1445 | ACGUACGUUCUUUCUAUCAUA | 1707 |
| AM17565-SS | (TriAlk14)gsuugacgaUfGfGfucauuuuguas(invAb) | 1446 | GUUGACGAUGGUCAUUUUGUA | 1708 |
| AM17567-SS | (TriAlk14)gsugacgauGfGfUfcauuuugucas(invAb) | 1447 | GUGACGAUGGUCAUUUUGUCA | 1709 |
| AM17855-SS | (NH2-C6)csuaaccgaGfGfUfcgaaacguaas(invAb) | 1448 | CUAACCGAGGUCGAAACGUAA | 1706 |
| AM17927-SS | (TriAlk14)csuaaccgaGfgUfcGfaaacguaas(invAb) | 1449 | CUAACCGAGGUCGAAACGUAA | 1706 |
| AM17932-SS | (TriAlk14)csuaaccgaGfgUfcgaaacguaas(invAb) | 1450 | CUAACCGAGGUCGAAACGUAA | 1706 |
| AM18486-SS | (TriAlk14)csccgaacaAfCfAfuggauagagas(invAb) | 1451 | CCCGAACAACAUGGAUAGAGA | 1710 |
| AM18488-SS | (TriAlk14)gsacaacauGfGfAfuagaicaguus(invAb) | 1452 | GACAACAUGGAUAGAICAGUU | 1711 |
| AM18519-SS | (TriAlk14)a_2NscguacguUfCfUfuucuaucauas(invAb) | 1453 | (A^{2N})CGUACGUUCUUUCUAUCAUA | 1770 |
| AM18522-SS | (TriAlk14)ascguacguUfcUfuUfcuaucauas(invAb) | 1454 | ACGUACGUUCUUUCUAUCAUA | 1707 |
| AM18527-SS | (TriAlk14)ascguacguUfcUfUfucuaucauas(invAb) | 1455 | ACGUACGUUCUUUCUAUCAUA | 1707 |

(A^{2N}) = 2-aminoadenosine nucleotide;
I = hypoxanthine (inosine) nucleotide

TABLE 5B
IAV RNAi Agent (targeting NS1) Sense Strand Sequences (Shown With (TriAlk14)
Linker or Targeting Ligand (see Table 11 for structure information.))

| | | | Underlying Base | |
|---|---|---|---|---|
| | | SEQ | Sequence (5′ → 3′) | SEQ |
| | | ID | (Shown as an Unmodified | ID |
| Strand ID | Modified Sense Strand (5′ → 3′) | NO. | Nucleotide Sequence) | NO. |
| AM15869-SS | (TriAlk14)gsauacagaGfAfUfucgcuuigaas(invAb) | 1456 | GAUACAGAGAUUCGCUUIGAA | 1712 |
| AM15870-SS | (TriAlk14)asgcuuucuCfGfUfuucagcuuaus(invAb) | 1457 | AGCUUUCUCGUUUCAGCUUAU | 1713 |
| AM15871-SS | (TriAlk14)gscuugaauGfGfAfaugguaacaas(invAb) | 1458 | GCUUGAAUGGAAUGGUAACAA | 1714 |
| AM15873-SS | (TriAlk14)gscgacagaGfAfAfuaguuucgaas(invAb) | 1459 | GCGACAGAGAAUAGUUUCGAA | 1715 |
| AM15876-SS | (TriAlk14)gsaugaggaUfGfUfcaaaaaugcas(invAb) | 1460 | GAUGAGGAUGUCAAAAAUGCA | 1716 |
| AM16806-SS | (TriAlk14)gsaugaggaUfgUfcAfaaaaugcas(invAb) | 1461 | GAUGAGGAUGUCAAAAAUGCA | 1716 |
| AM17577-SS | (TriAlk14)gsugaugccCfCfAfuuccuugauas(invAb) | 1462 | GUGAUGCCCCAUUCCUUGAUA | 1717 |
| AM17579-SS | (TriAlk14)usgaugcccCfAfUfuccuugaucas(invAb) | 1463 | UGAUGCCCCAUUCCUUGAUCA | 1718 |
| AM17581-SS | (TriAlk14)gsaugccccAfUfUfccuuiaucgas(invAb) | 1464 | GAUGCCCCAUUCCUUIAUCGA | 1719 |
| AM17583-SS | (TriAlk14)csucaucggAfGfGfacuugaaugas(invAb) | 1465 | CUCAUCGGAGGACUUGAAUGA | 1720 |
| AM17585-SS | (TriAlk14)uscaucggaGfGfAfcuugaauigas(invAb) | 1466 | UCAUCGGAGGACUUGAAUIGA | 1721 |
| AM17587-SS | (TriAlk14)csaucggagGfAfCfuugaauggaas(invAb) | 1467 | CAUCGGAGGACUUGAAUGGAA | 1722 |
| AM17589-SS | (TriAlk14)uscggaggaCfUfUfgaauggaauas(invAb) | 1468 | UCGGAGGACUUGAAUGGAAUA | 1723 |
| AM17591-SS | (TriAlk14)csggaggacUfUfGfaaugiaaugas(invAb) | 1469 | CGGAGGACUUGAAUGIAAUGA | 1724 |
| AM17593-SS | (TriAlk14)ascugaaagCfGfAfacuucaiugus(invAb) | 1470 | ACUGAAAGCGAACUUCAIUGU | 1725 |
| AM17595-SS | (TriAlk14)csuucucuuCfCfAfggacauacuus(invAb) | 1471 | CUUCUCUUCCAGGACAUACUU | 1726 |
| AM17597-SS | (TriAlk14)gsaugucaaAfAfAfugcaiuuggas(invAb) | 1472 | GAUGUCAAAAAUGCAIUUGGA | 1727 |
| AM17599-SS | (TriAlk14)gsugaugagAfAfUfgggaiaccuus(invAb) | 1473 | GUGAUGAGAAUGGGAIACCUU | 1728 |
| AM19061-SS | (TriAlk14)gsaucuugaAfAfGfaggaauccaas(invAb) | 1474 | GAUCUUGAAAGAGGAAUCCAA | 1729 |
| AM19063-SS | (TriAlk14)ascgagacuGfGfUfucauicucaus(invAb) | 1475 | ACGAGACUGGUUCAUICUCAU | 1730 |
| AM19065-SS | (TriAlk14)gscgaacuuCfAfGfuguaaucuuus(invAb) | 1476 | GCGAACUUCAGUGUAAUCUUU | 1731 |
| AM19067-SS | (TriAlk14)asccgauuaGfAfGfaccuugauaas(invAb) | 1477 | ACCGAUUAGAGACCUUGAUAA | 1732 |
| AM19069-SS | (TriAlk14)gsuacuacuAfAfGfggcuuucacus(invAb) | 1478 | GUACUACUAAGGGCUUUCACU | 1733 |
| AM19071-SS | (TriAlk14)gsaaugguaAfCfAfcgguuciagus(invAb) | 1479 | GAAUGGUAACACGGUUCIAGU | 1734 |
| AM19073-SS | (TriAlk14)usgguaacaCfGfGfuucgaiucuas(invAb) | 1480 | UGGUAACACGGUUCGAIUCUA | 1735 |
| AM19075-SS | (TriAlk14)gsuuaugcaAfGfCfcuuacaacuas(invAb) | 1481 | GUUAUGCAAGCCUUACAACUA | 1736 |
| AM19077-SS | (TriAlk14)gsgagauaaGfAfGfcuuucuciuus(invAb) | 1482 | GGAGAUAAGAGCUUUCUCIUU | 1737 |

(A^{2N}) = 2-aminoadenosine nucleotide;
I = hypoxanthine (inosine) nucleotide

TABLE 5C
IAV RNAi Agent (targeting PB1) Sense Strand Sequences (Shown With (TriAlk14)
Linker or Targeting Ligand (see Table 11 for structure information.))

| | | | Underlying Base | |
|---|---|---|---|---|
| | | SEQ | Sequence (5′ → 3′) | SEQ |
| | | ID | (Shown as an Unmodified | ID |
| Strand ID | Modified Sense Strand (5′ → 3′) | NO. | Nucleotide Sequence) | NO. |
| AM16045-SS | (TriAlk14)uscaugccuUfGfAfaacaauggaas(invAb) | 1483 | UCAUGCCUUGAAACAAUGGAA | 1738 |
| AM16047-SS | (TriAlk14)usgcgaaaaGfCfUfugaacaiucus(invAb) | 1484 | UGCGAAAAGCUUGAACAIUCU | 1739 |
| AM16049-SS | (TriAlk14)gsugcagauUfAfGfagguuucguas(invAb) | 1485 | GUGCAGAUUAGAGGUUUCGUA | 1740 |
| AM16682-SS | (TriAlk14)asgaucuguUfCfCfaccauugaaas(invAb) | 1486 | AGAUCUGUUCCACCAUUGAAA | 1741 |
| AM17573-SS | (TriAlk14)gsgagaucaUfGfAfagaucuguuas(invAb) | 1487 | GGAGAUCAUGAAGAUCUGUUA | 1742 |
| AM17856-SS | (NH2-C6)asgaucuguUfCfCfaccauugaaas(invAb) | 1488 | AGAUCUGUUCCACCAUUGAAA | 1741 |
| AM18496-SS | (TriAlk14)gsaacagaaCfAfCfaccaauacuas(invAb) | 1489 | GAACAGAACACACCAAUACUA | 1743 |
| AM19083-SS | (TriAlk14)usggcucuuCfAfAfuuguucaucas(invAb) | 1490 | UGGCUCUUCAAUUGUUCAUCA | 1744 |

(A^{2N}) = 2-aminoadenosine nucleotide;
I = hypoxanthine (inosine) nucleotide

TABLE 5D
IAV RNAi Agent (targeting PB2) Sense Strand Sequences (Shown With (TriAlk14)
Linker or Targeting Ligand (see Table 11 for structure information.))

| | | | Underlying Base | |
|---|---|---|---|---|
| | | SEQ | Sequence (5′ → 3′) | SEQ |
| | | ID | (Shown as an Unmodified | ID |
| Strand ID | Modified Sense Strand (5′ → 3′) | NO. | Nucleotide Sequence) | NO. |
| AM16684-SS | (TriAlk14)gsggacucuAfGfCfauacuuacuas(invAb) | 1491 | GGGACUCUAGCAUACUUACUA | 1745 |
| AM17366-SS | (TriAlk14)gscgagauaCfUfCfacuaaiaccas(invAb) | 1492 | GCGAGAUACUCACUAAIACCA | 1746 |
| AM17368-SS | (TriAlk14)gsgucgaaaGfGfUfugaaacaugas(invAb) | 1493 | GGUCGAAAGGUUGAAACAUGA | 1747 |
| AM17370-SS | (TriAlk14)usgauggugGfCfGfuacaugcuaas(invAb) | 1494 | UGAUGGUGGCGUACAUGCUAA | 1748 |
| AM17575-SS | (TriAlk14)asggacaagCfGfGfaucaucaguas(invAb) | 1495 | AGGACAAGCGGAUCAUCAGUA | 1749 |
| AM17857-SS | (NH2-C6)gsggacucuAfGfCfauacuuacuas(invAb) | 1496 | GGGACUCUAGCAUACUUACUA | 1745 |
| AM18498-SS | (TriAlk14)uscgcugcuAfGfAfaacauaguaas(invAb) | 1497 | UCGCUGCUAGAAACAUAGUAA | 1750 |
| AM19085-SS | (TriAlk14)usccaguauUfCfAfauuacaacaas(invAb) | 1498 | UCCAGUAUUCAAUUACAACAA | 1751 |

(A^{2N}) = 2-aminoadenosine nucleotide;
I = hypoxanthine (inosine) nucleotide

TABLE 5E
IAV RNAi Agent (targeting NP) Sense Strand Sequences (Shown With (TriAlk14)
Linker or Targeting Ligand (see Table 11 for structure information.))

| | | | Underlying Base | |
|---|---|---|---|---|
| | | SEQ | Sequence (5′ → 3′) | SEQ |
| | | ID | (Shown as an Unmodified | ID |
| Strand ID | Modified Sense Strand (5′ → 3′) | NO. | Nucleotide Sequence) | NO. |
| AM16686-SS | (TriAlk14)gsccuuccuUfUfGfacaugaguaas(invAb) | 1499 | GCCUUCCUUUGACAUGAGUAA | 1752 |
| AM17372-SS | (TriAlk14)gscucuaauGfCfAfagguucaacas(invAb) | 1500 | GCUCUAAUGCAAGGUUCAACA | 1753 |
| AM17374-SS | (TriAlk14)ascgacuaaUfCfCfagaauagcaus(invAb) | 1501 | ACGACUAAUCCAGAAUAGCAU | 1754 |
| AM17569-SS | (TriAlk14)gsaucagaaUfGfAfucaaaciugas(invAb) | 1502 | GAUCAGAAUGAUCAAACIUGA | 1755 |
| AM17858-SS | (NH2-C6)gsccuuccuUfUfGfacaugaguaas(invAb) | 1503 | GCCUUCCUUUGACAUGAGUAA | 1752 |
| AM18490-SS | (TriAlk14)csugucggaAfGfAfaugauugguas(invAb) | 1504 | CUGUCGGAAGAAUGAUUGGUA | 1756 |
| AM19051-SS | (TriAlk14)asgagaggaUfGfGfugcuuucugas(invAb) | 1505 | AGAGAGGAUGGUGCUUUCUGA | 1757 |
| AM19053-SS | (TriAlk14)csugaaugaUfGfCfcacauaucaas(invAb) | 1506 | CUGAAUGAUGCCACAUAUCAA | 1758 |
| AM19055-SS | (TriAlk14)ascggucagCfAfCfucauucugaas(invAb) | 1507 | ACGGUCAGCACUCAUUCUGAA | 1759 |
| AM19057-SS | (TriAlk14)gscucacaaGfAfGfucaauugguas(invAb) | 1508 | GCUCACAAGAGUCAAUUGGUA | 1760 |
| AM19059-SS | (TriAlk14)gsuaaugaaGfGfGfucuuauuucus(invAb) | 1509 | GUAAUGAAGGGUCUUAUUUCU | 1761 |

(A^{2N}) = 2-aminoadenosine nucleotide;
I = hypoxanthine (inosine) nucleotide

TABLE 5F
IAV RNAi Agent (targeting PA) Sense Strand Sequences (Shown With (TriAlk14)
Linker or Targeting Ligand (see Table 11 for structure information.))

| | | | Underlying Base | |
|---|---|---|---|---|
| | | SEQ | Sequence (5′ → 3′) | SEQ |
| | | ID | (Shown as an Unmodified | ID |
| Strand ID | Modified Sense Strand (5′ → 3′) | NO. | Nucleotide Sequence) | NO. |
| AM16678-SS | (TriAlk14)gsacuuuguGfCfGfacaaugcuuas(invAb) | 1510 | GACUUUGUGCGACAAUGCUUA | 1762 |
| AM16680-SS | (TriAlk14)cscacuauaUfGfAfugcaaucaaas(invAb) | 1511 | CCACUAUAUGAUGCAAUCAAA | 1763 |
| AM16807-SS | (TriAlk14)gsa_2NaucaaaAfCfUfaggcuuuucas(invAb) | 1512 | G(A^{2N})AUCAAAACUAGGCUUUUCA | 1771 |
| AM16809-SS | (TriAlk14)usgcaaagaUfGfUfuggaiaccuus(invAb) | 1513 | UGCAAAGAUGUUGGAIACCUU | 1765 |
| AM17571-SS | (TriAlk14)csgaggaguGfCfCfugauuaaugas(invAb) | 1514 | CGAGGAGUGCCUGAUUAAUGA | 1766 |
| AM17859-SS | (NH2-C6)gsacuuuguGfCfGfacaaugcuuas(invAb) | 1515 | GACUUUGUGCGACAAUGCUUA | 1762 |
| AM17860-SS | (NH2-C6)cscacuauaUfGfAfugcaaucaaas(invAb) | 1516 | CCACUAUAUGAUGCAAUCAAA | 1763 |
| AM18494-SS | (TriAlk14)gsguauucgGfAfUfuuccauuucas(invAb) | 1517 | GGUAUUCGGAUUUCCAUUUCA | 1767 |
| AM19079-SS | (TriAlk14)gsccuauguAfGfAfuggauucgaas(invAb) | 1518 | GCCUAUGUAGAUGGAUUCGAA | 1768 |
| AM19081-SS | (TriAlk14)asucccaauGfa_2NUfaagcaaaugus(invAb) | 1519 | AUCCCAAUG(A^{2N})UAAGCAAAUGU | 1772 |

(A^{2N}) = 2-aminoadenosine nucleotide;
I = hypoxanthine (inosine) nucleotide

TABLE 6A
IAV RNAi Agent (targeting M1) Sense Strand Sequences
(Shown with Targeting Ligand Conjugate. The structure of αvβ6-SM6.1 is shown
in Table 11, and the structure of Tri-SM6.1-αvβ6-TA14 is shown in FIG. 1.)

| | | | Corresponding |
|---|---|---|---|
| | | | Sense Strand |
| | | | AM Number |
| | | SEQ | Without Linker |
| | | ID | or Conjugate |
| Strand ID | Modified Sense Strand (5′ → 3′) | NO. | (See Table 4) |
| CS003268 | Tri-SM6.1-αvβ6-TA14-csuaaccgaGfGfUfcgaaacguaas(invAb) | 1520 | AM16676-SS-NL |
| CS003315 | Tri-SM6.1-αvβ6-TA14-ascguacguUfCfUfuucuaucauas(invAb) | 1521 | AM16811-SS-NL |
| CS003507 | Tri-SM6.1-αvβ6-TA14-gsuugacgaUfGfGfucauuuuguas(invAb) | 1522 | AM17565-SS-NL |
| CS003509 | Tri-SM6.1-αvβ6-TA14-gsugacgauGfGfUfcauuuugucas(invAb) | 1523 | AM17567-SS-NL |
| CS003633 | Tri-SM6.1-αvβ6-TA14-csuaaccgaGfgUfcGfaaacguaas(invAb) | 1524 | AM17927-SS-NL |
| CS003638 | Tri-SM6.1-αvβ6-TA14-csuaaccgaGfgUfcgaaacguaas(invAb) | 1525 | AM17932-SS-NL |
| CS003670 | Tri-SM6.1-αvβ6-TA14-csccgaacaAfCfAfuggauagagas(invAb) | 1526 | AM18486-SS-NL |
| CS003672 | Tri-SM6.1-αvβ6-TA14-gsacaacauGfGfAfuagaicaguus(invAb) | 1527 | AM18488-SS-NL |
| CS003699 | Tri-SM6.1-αvβ6-TA14-a_2NscguacguUfCfUfuucuaucauas(invAb) | 1528 | AM18519-SS-NL |
| CS003702 | Tri-SM6.1-αvβ6-TA14-ascguacguUfcUfuUfcuaucauas(invAb) | 1529 | AM18522-SS-NL |
| CS003707 | Tri-SM6.1-αvβ6-TA14-ascguacguUfcUfUfucuaucauas(invAb) | 1530 | AM18527-SS-NL |

TABLE 6B
IAV RNAi Agent (targeting NS1) Sense Strand Sequences
(Shown with Targeting Ligand Conjugate. The structure of αvβ6-SM6.1 is shown
in Table 11, and the structure of Tri-SM6.1-αvβ6-TA14 is shown in FIG. 1.)

| | | | Corresponding |
|---|---|---|---|
| | | | Sense Strand |
| | | | AM Number |
| | | SEQ | Without Linker |
| | | ID | or Conjugate |
| Strand ID | Modified Sense Strand (5′ → 3′) | NO. | (See Table 4) |
| CS002930 | Tri-SM6.1-αvβ6-TA14-gsauacagaGfAfUfucgcuuigaas(invAb) | 1531 | AM15869-SS-NL |
| CS002932 | Tri-SM6.1-αvβ6-TA14-asgcuuucuCfGfUfuucagcuuaus(invAb) | 1532 | AM15870-SS-NL |
| CS002934 | Tri-SM6.1-αvβ6-TA14-gscuugaauGfGfAfaugguaacaas(invAb) | 1533 | AM15871-SS-NL |
| CS002936 | Tri-SM6.1-αvβ6-TA14-gscgacagaGfAfAfuaguuucgaas(invAb) | 1534 | AM15873-SS-NL |
| CS002939 | Tri-SM6.1-αvβ6-TA14-gsaugaggaUfGfUfcaaaaaugcas(invAb) | 1535 | AM15876-SS-NL |
| CS003308 | Tri-SM6.1-αvβ6-TA14-gsaugaggaUfgUfcAfaaaaugcas(invAb) | 1536 | AM16806-SS-NL |
| CS003519 | Tri-SM6.1-αvβ6-TA14-gsugaugccCfCfAfuuccuugauas(invAb) | 1537 | AM17577-SS-NL |
| CS003521 | Tri-SM6.1-αvβ6-TA14-usgaugcccCfAfUfuccuugaucas(invAb) | 1538 | AM17579-SS-NL |
| CS003523 | Tri-SM6.1-αvβ6-TA14-gsaugccccAfUfUfccuuiaucgas(invAb) | 1539 | AM17581-SS-NL |
| CS003525 | Tri-SM6.1-αvβ6-TA14-csucaucggAfGfGfacuugaaugas(invAb) | 1540 | AM17583-SS-NL |
| CS003527 | Tri-SM6.1-αvβ6-TA14-uscaucggaGfGfAfcuugaauigas(invAb) | 1541 | AM17585-SS-NL |
| CS003529 | Tri-SM6.1-αvβ6-TA14-csaucggagGfAfCfuugaauggaas(invAb) | 1542 | AM17587-SS-NL |
| CS003531 | Tri-SM6.1-αvβ6-TA14-uscggaggaCfUfUfgaauggaauas(invAb) | 1543 | AM17589-SS-NL |
| CS003533 | Tri-SM6.1-αvβ6-TA14-csggaggacUfUfGfaaugiaaugas(invAb) | 1544 | AM17591-SS-NL |
| CS003535 | Tri-SM6.1-αvβ6-TA14-ascugaaagCfGfAfacuucaiugus(invAb) | 1545 | AM17593-SS-NL |
| CS003537 | Tri-SM6.1-αvβ6-TA14-csuucucuuCfCfAfggacauacuus(invAb) | 1546 | AM17595-SS-NL |
| CS003539 | Tri-SM6.1-αvβ6-TA14-gsaugucaaAfAfAfugcaiuuggas(invAb) | 1547 | AM17597-SS-NL |
| CS003541 | Tri-SM6.1-αvβ6-TA14-gsugaugagAfAfUfgggaiaccuus(invAb) | 1548 | AM17599-SS-NL |
| CS003925 | Tri-SM6.1-αvβ6-TA14-gsaucuugaAfAfGfaggaauccaas(invAb) | 1549 | AM19061-SS-NL |
| CS003927 | Tri-SM6.1-αvβ6-TA14-ascgagacuGfGfUfucauicucaus(invAb) | 1550 | AM19063-SS-NL |
| CS003929 | Tri-SM6.1-αvβ6-TA14-gscgaacuuCfAfGfuguaaucuuus(invAb) | 1551 | AM19065-SS-NL |
| CS003931 | Tri-SM6.1-αvβ6-TA14-asccgauuaGfAfGfaccuugauaas(invAb) | 1552 | AM19067-SS-NL |
| CS003933 | Tri-SM6.1-αvβ6-TA14-gsuacuacuAfAfGfggcuuucacus(invAb) | 1553 | AM19069-SS-NL |
| CS003935 | Tri-SM6.1-αvβ6-TA14-gsaaugguaAfCfAfcgguuciagus(invAb) | 1554 | AM19071-SS-NL |
| CS003937 | Tri-SM6.1-αvβ6-TA14-usgguaacaCfGfGfuucgaiucuas(invAb) | 1555 | AM19073-SS-NL |
| CS003939 | Tri-SM6.1-αvβ6-TA14-gsuuaugcaAfGfCfcuuacaacuas(invAb) | 1556 | AM19075-SS-NL |
| CS003941 | Tri-SM6.1-αvβ6-TA14-gsgagauaaGfAfGfcuuucuciuus(invAb) | 1557 | AM19077-SS-NL |

TABLE 6C
IAV RNAi Agent (targeting PB1) Sense Strand Sequences
(Shown with Targeting Ligand Conjugate. The structure of αvβ6-SM6.1 is shown
in Table 11, and the structure of Tri-SM6.1-αvβ6-TA14 is shown in FIG. 1.)

| | | | Corresponding |
|---|---|---|---|
| | | | Sense Strand |
| | | | AM Number |
| | | SEQ | Without Linker |
| | | ID | or Conjugate |
| Strand ID | Modified Sense Strand (5′ → 3′) | NO. | (See Table 4) |
| CS003004 | Tri-SM6.1-αvβ6-TA14-uscaugccuUfGfAfaacaauggaas(invAb) | 1558 | AM16045-SS-NL |
| CS003006 | Tri-SM6.1-αvβ6-TA14-usgcgaaaaGfCfUfugaacaiucus(invAb) | 1559 | AM16047-SS-NL |
| CS003008 | Tri-SM6.1-αvβ6-TA14-gsugcagauUfAfGfagguuucguas(invAb) | 1560 | AM16049-SS-NL |
| CS003274 | Tri-SM6.1-αvβ6-TA14-asgaucuguUfCfCfaccauugaaas(invAb) | 1561 | AM16682-SS-NL |
| CS003515 | Tri-SM6.1-αvβ6-TA14-gsgagaucaUfGfAfagaucuguuas(invAb) | 1562 | AM17573-SS-NL |
| CS003681 | Tri-SM6.1-αvβ6-TA14-gsaacagaaCfAfCfaccaauacuas(invAb) | 1563 | AM18496-SS-NL |
| CS003947 | Tri-SM6.1-αvβ6-TA14-usggcucuuCfAfAfuuguucaucas(invAb) | 1564 | AM19083-SS-NL |

TABLE 6D
IAV RNAi Agent (targeting PB2) Sense Strand Sequences
(Shown with Targeting Ligand Conjugate. The structure of αvβ6-SM6.1 is shown
in Table 11, and the structure of Tri-SM6.1-αvβ6-TA14 is shown in FIG. 1.)

| | | | Corresponding |
|---|---|---|---|
| | | | Sense Strand |
| | | | AM Number |
| | | SEQ | Without Linker |
| | | ID | or Conjugate |
| Strand ID | Modified Sense Strand (5′ → 3′) | NO. | (See Table 4) |
| CS003276 | Tri-SM6.1-αvβ6-TA14-gsggacucuAfGfCfauacuuacuas(invAb) | 1565 | AM16684-SS-NL |
| CS003407 | Tri-SM6.1-αvβ6-TA14-gscgagauaCfUfCfacuaaiaccas(invAb) | 1566 | AM17366-SS-NL |
| CS003409 | Tri-SM6.1-αvβ6-TA14-gsgucgaaaGfGfUfugaaacaugas(invAb) | 1567 | AM17368-SS-NL |
| CS003411 | Tri-SM6.1-αvβ6-TA14-usgauggugGfCfGfuacaugcuaas(invAb) | 1568 | AM17370-SS-NL |
| CS003517 | Tri-SM6.1-αvβ6-TA14-asggacaagCfGfGfaucaucaguas(invAb) | 1569 | AM17575-SS-NL |
| CS003683 | Tri-SM6.1-αvβ6-TA14-uscgcugcuAfGfAfaacauaguaas(invAb) | 1570 | AM18498-SS-NL |
| CS003949 | Tri-SM6.1-αvβ6-TA14-usccaguauUfCfAfauuacaacaas(invAb) | 1571 | AM19085-SS-NL |

TABLE 6E
IAV RNAi Agent (targeting NP) Sense Strand Sequences
(Shown with Targeting Ligand Conjugate. The structure of αvβ6-SM6.1 is shown
in Table 11, and the structure of Tri-SM6.1-αvβ6-TA14 is shown in FIG. 1.)

| | | | Corresponding |
|---|---|---|---|
| | | | Sense Strand |
| | | | AM Number |
| | | SEQ | Without Linker |
| | | ID | or Conjugate |
| Strand ID | Modified Sense Strand (5′ → 3′) | NO. | (See Table 4) |
| CS003278 | Tri-SM6.1-αvβ6-TA14-gsccuuccuUfUfGfacaugaguaas(invAb) | 1572 | AM16686-SS-NL |
| CS003413 | Tri-SM6.1-αvβ6-TA14-gscucuaauGfCfAfagguucaacas(invAb) | 1573 | AM17372-SS-NL |
| CS003415 | Tri-SM6.1-αvβ6-TA14-ascgacuaaUfCfCfagaauagcaus(invAb) | 1574 | AM17374-SS-NL |
| CS003511 | Tri-SM6.1-αvβ6-TA14-gsaucagaaUfGfAfucaaaciugas(invAb) | 1575 | AM17569-SS-NL |
| CS003674 | Tri-SM6.1-αvβ6-TA14-csugucggaAfGfAfaugauugguas(invAb) | 1576 | AM18490-SS-NL |
| CS003915 | Tri-SM6.1-αvβ6-TA14-asgagaggaUfGfGfugcuuucugas(invAb) | 1577 | AM19051-SS-NL |
| CS003917 | Tri-SM6.1-αvβ6-TA14-csugaaugaUfGfCfcacauaucaas(invAb) | 1578 | AM19053-SS-NL |
| CS003919 | Tri-SM6.1-αvβ6-TA14-ascggucagCfAfCfucauucugaas(invAb) | 1579 | AM19055-SS-NL |
| CS003921 | Tri-SM6.1-αvβ6-TA14-gscucacaaGfAfGfucaauugguas(invAb) | 1580 | AM19057-SS-NL |
| CS003923 | Tri-SM6.1-αvβ6-TA14-gsuaaugaaGfGfGfucuuauuucus(invAb) | 1581 | AM19059-SS-NL |

TABLE 6F
IAV RNAi Agent (targeting PA) Sense Strand Sequences (Shown with Targeting
Ligand Conjugate. The structure of αvß6-SM6.1 is shown in Table 11,
and the structure of Tri-SM6.1-αvß6-TA14 is shown in FIG. 1.)

| | | | Corresponding |
|---|---|---|---|
| | | | Sense Strand |
| | | | AM Number |
| | | | Without Linker |
| Strand | | SEQ | or Conjugate |
| ID | Modified Sense Strand (5′ → 3′) | ID NO. | (see Table 4) |
| CS003270 | Tri-SM6.1-αvß6-TA14-gsacuuuguGfCfGfacaaugcuuas(invAb) | 1582 | AM16678-SS-NL |
| CS003272 | Tri-SM6.1-αvß6-TA14-cscacuauaUfGfAfugcaaucaaas(invAb) | 1583 | AM16680-SS-NL |
| CS003311 | Tri-SM6.1-αvß6-TA14-gsa_2NaucaaaAfCfUfaggcuuuucas(invAb) | 1584 | AM16807-SS-NL |
| CS003313 | Tri-SM6.1-αvß6-TA14-usgcaaagaUfGfUfuggaiaccuus(invAb) | 1585 | AM16809-SS-NL |
| CS003513 | Tri-SM6.1-αvß6-TA14-csgaggaguGfCfCfugauuaaugas(invAb) | 1586 | AM17571-SS-NL |
| CS003679 | Tri-SM6.1-αvß6-TA14-gsguauucgGfAfUfuuccauuucas(invAb) | 1587 | AM18494-SS-NL |
| CS003943 | Tri-SM6.1-αvß6-TA14-gsccuauguAfGfAfuggauucgaas(invAb) | 1588 | AM19079-SS-NL |
| CS003945 | Tri-SM6.1-αvß6-TA14-asucccaauGfa_2NUfaagcaaaugus(invAb) | 1589 | AM19081-SS-NL |

[0185] The IAV RNAi agents disclosed herein are formed by annealing an antisense strand with a sense strand. A sense strand containing a sequence listed in Table 2A, 2B, 2C, 2D, 2E, 2F, 4A, 4B, 4C, 4D, 4E, 4F, 5A, 5B, 5C, 5D, 5E, 5F, 6A, 6B, 6C, 6D, 6E, or 6F can be hybridized to any antisense strand containing a sequence listed in Table 2A, 2B, 2C, 2D, 2E, 2F, 3A, 3B, 3C, 3D, 3E, or 3F, provided the two sequences have a region of at least 85% complementarity over a contiguous 16, 17, 18, 19, 20, or 21 nucleotide sequence.

[0186] As shown in Tables 5A, 5B, 5C, 5D, 5E, and 5F above, certain of the example IAV RNAi agent nucleotide sequences are shown to further include reactive linking groups at one or both of the 5′ terminal end and the 3′ terminal end of the sense strand. For example, many of the IAV RNAi agent sense strand sequences shown in Tables 5A, 5B, 5C, 5D, 5E, and 5F above have a (TriAlk14) linking group at the 5′ end of the nucleotide sequence. Other linking groups, such as an (NH2-C6) linking group or a (6-SS-6) or (C6-SS-C6) linking group, may be present as well or alternatively in certain embodiments. Such reactive linking groups are positioned to facilitate the linking of targeting ligands, targeting groups, and/or PK/PD modulators to the IAV RNAi agents disclosed herein. Linking or conjugation reactions are well known in the art and provide for formation of covalent linkages between two molecules or reactants. Suitable conjugation reactions for use in the scope of the inventions herein include, but are not limited to, amide coupling reaction, Michael addition reaction, hydrazone formation reaction, inverse-demand Diels-Alder cycloaddition reaction, oxime ligation, and Copper (I)-catalyzed or strain-promoted azide-alkyne cycloaddition reaction cycloaddition reaction.

[0187] In some embodiments, targeting ligands, such as the integrin targeting ligands shown in the examples and figures disclosed herein, can be synthesized as activated esters, such as tetrafluorophenyl (TFP) esters, which can be displaced by a reactive amino group (e.g., NH₂-C₆) to attach the targeting ligand to the IAV RNAi agents disclosed herein. In some embodiments, targeting ligands are synthesized as azides, which can be conjugated to a propargyl (e.g., TriAlk14) or DBCO group, for example, via Copper (I)-catalyzed or strain-promoted azide-alkyne cycloaddition reaction.

[0188] Additionally, certain of the nucleotide sequences can be synthesized with a dT nucleotide at the 3′ terminal end of the sense strand, followed by (3′→5′) a linker (e.g., C6-SS-C6). The linker can, in some embodiments, facilitate the linkage to additional components, such as, for example, a PK/PD modulator or one or more targeting ligands. As described herein, the disulfide bond of C6-SS-C6 is first reduced, removing the dT from the molecule, which can then facilitate the conjugation of the desired PK/PD modulator. The terminal dT nucleotide therefore is not a part of the fully conjugated construct.

[0189] In some embodiments, the antisense strand of an IAV RNAi agent disclosed herein differs by 0, 1, 2, or 3 nucleotides from any of the antisense strand sequences in Table 3A, 3B, 3C, 3D, 3E, 3F, 10A, 10B, 10C, 10D, 10E., or 10F. In some embodiments, the sense strand of an IAV RNAi agent disclosed herein differs by 0, 1, 2, or 3 nucleotides from any of the sense strand sequences in Table 4A, 4B, 4C, 4D, 4E, 4F, 5A, 5B, 5C, 5D, 5E, 5F, 6A, 6B, 6C, 6D, 6E, 6F, 10A, 10B, 10C, 10D, 10E, or 10F.

[0190] In some embodiments, an IAV RNAi agent antisense strand comprises a nucleotide sequence of any of the sequences in Table 2 or Table 3. In some embodiments, an IAV RNAi agent antisense strand comprises the sequence of nucleotides (from 5′ end→3′ end) 1-17, 2-17, 1-18, 2-18, 1-19, 2-19, 1-20, 2-20, 1-21, 2-21, 1-22, 2-22, 1-23, 2-23, 1-24, or 2-24 of any of the sequences in Table 2A, 2B, 2C, 2D, 2E, 2F, 3A, 3B, 3C, 3D, 3E, 3F, 10A, 10B, 10C, 10D, 10E, or 10F. In certain embodiments, an IAV RNAi agent antisense strand comprises or consists of a modified sequence of any one of the modified sequences in Table 3 or Table 10.

[0191] In some embodiments, an IAV RNAi agent sense strand comprises the nucleotide sequence of any of the sequences in Table 2 or Table 4. In some embodiments, an IAV RNAi agent sense strand comprises the sequence of nucleotides (from 5′ end→3′ end) 1-17, 2-17, 3-17, 4-17, 1-18, 2-18, 3-18, 4-18, 1-19, 2-19, 3-19, 4-19, 1-20, 2-20, 3-20, 4-20, 1-21, 2-21, 3-21, 4-21, 1-22, 2-22, 3-22, 4-22, 1-23, 2-23, 3-23, 4-23, 1-24, 2-24, 3-24, or 4-24, of any of the sequences in Table 2A, 2B, 2C, 2D, 2E, 2F, 4A, 4B, 4C, 4D, 4E, 4F, 5A, 5B, 5C, 5D, 5E, 5F, 6A, 6B, 6C, 6D, 6E, 6F, 10A, 10B, 10C, 10D, 10E, or 10F. In certain embodiments, an IAV RNAi agent sense strand comprises or consists of a modified sequence of any one of the modified sequences in Table 3A, 3B, 3C, 3D, 3E, 3F, 10A, 10B, 10C, 10D, 10E, or 10F.

[0192] For the RNAi agents disclosed herein, the nucleotide at position 1 of the antisense strand (from 5′ end→3′ end) can be perfectly complementary to an influenza A viral genome viral genome, or can be non-complementary to an influenza A viral genome viral genome. In some embodiments, the nucleotide at position 1 of the antisense strand (from 5′ end→3′ end) is a U, A, or dT (or a modified version of U, A or dT). In some embodiments, the nucleotide at position 1 of the antisense strand (from 5′ end→3′ end) forms an A:U or U:A base pair with the sense strand.

[0193] In some embodiments, an IAV RNAi agent antisense strand comprises the sequence of nucleotides (from 5′ end→3′ end) 2-18 or 2-19 of any of the antisense strand sequences in Table 2A, 2B, 2C, 2D, 2E, 2F, 3A, 3B, 3C, 3D, 3E, 3F, 10A, 10B, 10C, 10D, 10E, or 10F. In some embodiments, an influenza A viral genome RNAi sense strand comprises the sequence of nucleotides (from 5′ end→3′ end) 1-17 or 1-18 of any of the sense strand sequences in Table 2A, 2B, 2C, 2D, 2E, 2F, 4A, 4B, 4C, 4D, 4E, 4F, 5A, 5B, 5C, 5D, 5E, 5F, 6A, 6B, 6C, 6D, 6E, 6F, 10A, 10B, 10C, 10D, 10E, or 10F.

[0194] In some embodiments, an IAV RNAi agent includes (i) an antisense strand comprising the sequence of nucleotides (from 5′ end→3′ end) 2-18 or 2-19 of any of the antisense strand sequences in Table 2, Table 3, or Table 10, and (ii) a sense strand comprising the sequence of nucleotides (from 5′ end→3′ end) 1-17 or 1-18 of any of the sense strand sequences in 2A, 2B, 2C, 2D, 2E, 2F, 4A, 4B, 4C, 4D, 4E, 4F, 5A, 5B, 5C, 5D, 5E, 5F, 6A, 6B, 6C, 6D, 6E, 6F, 10A, 10B, 10C, 10D, 10E, or 10F.

[0195] A sense strand containing a sequence listed in Table 2 or Table 4 can be hybridized to any antisense strand containing a sequence listed in Table 2 or Table 3 provided the two sequences have a region of at least 85% complementarity over a contiguous 16, 17, 18, 19, 20, or 21 nucleotide sequence. In some embodiments, the IAV RNAi agent has a sense strand consisting of the modified sequence of any of the modified sequences in Table 4A, 4B, 4C, 4D, 4E, 4F, 5A, 5B, 5C, 5D, 5E, 5F, 6A, 6B, 6C, 6D, 6E, 6F, 10A, 10B, 10C, 10D, 10E, or 10F, and an antisense strand consisting of the modified sequence of any of the modified sequences in Table 3A, 3B, 3C, 3D, 3E, 3F, 10A, 10B, 10C, 10D, 10E, or 10F. Certain representative sequence pairings are exemplified by the Duplex ID Nos. shown in Tables 7A-1, 7A-2, 7A-3, 7A-4, 7A-5, 7A-6, 7B-1, 7B-2, 7B-3, 7B-4, 7B-5, 7B-6, 8A, 8B, 8C, 8D, 8E, 8F, 9A, 9B, 9C, 9D, 9E, and 9F.

[0196] In some embodiments, an IAV RNAi agent comprises, consists of, or consists essentially of a duplex represented by any one of the Duplex ID Nos. presented herein. In some embodiments, an IAV RNAi agent consists of any of the Duplex ID Nos. presented herein. In some embodiments, an IAV RNAi agent comprises the sense strand and antisense strand nucleotide sequences of any of the Duplex ID Nos. presented herein. In some embodiments, an IAV RNAi agent comprises the sense strand and antisense strand nucleotide sequences of any of the Duplex ID Nos. presented herein and a targeting group, linking group, and/or other non-nucleotide group wherein the targeting group, linking group, and/or other non-nucleotide group is covalently linked (i.e., conjugated) to the sense strand or the antisense strand. In some embodiments, an IAV RNAi agent includes the sense strand and antisense strand modified nucleotide sequences of any of the Duplex ID Nos. presented herein. In some embodiments, an IAV RNAi agent comprises the sense strand and antisense strand modified nucleotide sequences of any of the Duplex ID Nos. presented herein and a targeting group, linking group, and/or other non-nucleotide group, wherein the targeting group, linking group, and/or other non-nucleotide group is covalently linked to the sense strand or the antisense strand.

[0197] In some embodiments, an IAV RNAi agent comprises an antisense strand and a sense strand having the nucleotide sequences of any of the antisense strand/sense strand duplexes of Tables 2A, 2B, 2C, 2D, 2E, 2F, 7A-1, 7A-2, 7A-3, 7A-4, 7A-5, 7A-6, 7B-1, 7B-2, 7B-3, 7B-4, 7B-5, 7B-6, 8A, 8B, 8C, 8D, 8E, 8F, 9A, 9B, 9C, 9D, 9E, 9F, 10A, 10B, 10C, 10D, 10E, or 10F, and comprises a targeting group. In some embodiments, an IAV RNAi agent comprises an antisense strand and a sense strand having the nucleotide sequences of any of the antisense strand/sense strand duplexes of Tables 2A, 2B, 2C, 2D, 2E, 2F, 7A-1, 7A-2, 7A-3, 7A-4, 7A-5, 7A-6, 7B-1, 7B-2, 7B-3, 7B-4, 7B-5, 7B-6, 8A, 8B, 8C, 8D, 8E, 8F, 9A, 9B, 9C, 9D, 9E, 9F, 10A, 10B, 10C, 10D, 10E, or 10F, and comprises one or more αvβ6 integrin targeting ligands.

[0198] In some embodiments, an IAV RNAi agent comprises an antisense strand and a sense strand having the nucleotide sequences of any of the antisense strand/sense strand duplexes of Tables 2A, 2B, 2C, 2D, 2E, 2F, 7A-1, 7A-2, 7A-3, 7A-4, 7A-5, 7A-6, 7B-1, 7B-2, 7B-3, 7B-4, 7B-5, 7B-6, 8A, 8B, 8C, 8D, 8E, 8F, 9A, 9B, 9C, 9D, 9E, 9F, 10A, 10B, 10C, 10D, 10E, or 10F, and comprises a targeting group that is an integrin targeting ligand. In some embodiments, an IAV RNAi agent comprises an antisense strand and a sense strand having the nucleotide sequences of any of the antisense strand/sense strand duplexes of Tables 2A, 2B, 2C, 2D, 2E, 2F, 7A-1, 7A-2, 7A-3, 7A-4, 7A-5, 7A-6, 7B-1, 7B-2, 7B-3, 7B-4, 7B-5, 7B-6, 8A, 8B, 8C, 8D, 8E, 8F, 9A, 9B, 9C, 9D, 9E, 9F, 10A, 10B, 10C, 10D, 10E, or 10F, and comprises one or more αvβ6 integrin targeting ligands or clusters of αvβ6 integrin targeting ligands (e.g., a tridentate αvβ6 integrin targeting ligand).

[0199] In some embodiments, an IAV RNAi agent comprises an antisense strand and a sense strand having the modified nucleotide sequences of any of the antisense strand/sense strand duplexes of Tables 7A-1, 7A-2, 7A-3, 7A-4, 7A-5, 7A-6, 7B-1, 7B-2, 7B-3, 7B-4, 7B-5, 7B-6, 8A, 8B, 8C, 8D, 8E, 8F, 9A, 9B, 9C, 9D, 9E, 9F, 10A, 10B, 10C, 10D, 10E, and 10F.

[0200] In some embodiments, an IAV RNAi agent comprises an antisense strand and a sense strand having the modified nucleotide sequences of any of the antisense strand/sense strand duplexes of Tables 7A-1, 7A-2, 7A-3, 7A-4, 7A-5, 7A-6, 7B-1, 7B-2, 7B-3, 7B-4, 7B-5, 7B-6, 8A, 8B, 8C, 8D, 8E, 8F, 9A, 9B, 9C, 9D, 9E, 9F, 10A, 10B, 10C, 10D, 10E, and 10F, and comprises an integrin targeting ligand.

[0201] In some embodiments, an IAV RNAi agent comprises, consists of, or consists essentially of any of the duplexes of Tables 7A-1, 7A-2, 7A-3, 7A-4, 7A-5, 7A-6, 7B-1, 7B-2, 7B-3, 7B-4, 7B-5, 7B-6, 8A, 8B, 8C, 8D, 8E, 8F, 9A, 9B, 9C, 9D, 9E, 9F, 10A, 10B, 10C, 10D, 10E, and 10F.

TABLE 7A-1
IAV RNAi agent (targeting M1) Duplexes with Corresponding Sense and Antisense
Strand ID Numbers and Sequence ID numbers for the modified and unmodified
nucleotide sequences. (Shown without Linking Agents or Conjugates)

| | | AS | AS | | SS | SS |
|---|---|---|---|---|---|---|
| | | modified | unmodified | | modified | unmodified |
| | | SEQ ID | SEQ ID | | SEQ ID | SEQ ID |
| Duplex | AS ID | NO: | NO: | SS ID | NO: | NO: |
| AD11733 | AM16677-AS | 1169 | 1590 | AM16676-SS-NL | 1368 | 1706 |
| AD11839 | AM16812-AS | 1170 | 1591 | AM16811-SS-NL | 1369 | 1707 |
| AD12417 | AM17566-AS | 1171 | 1602 | AM17565-SS-NL | 1370 | 1708 |
| AD12418 | AM17568-AS | 1172 | 1603 | AM17567-SS-NL | 1371 | 1709 |
| AD12619 | AM16677-AS | 1169 | 1590 | AM17855-SS-NL | 1372 | 1706 |
| AD12660 | AM17928-AS | 1173 | 1590 | AM17927-SS-NL | 1373 | 1706 |
| AD12661 | AM17929-AS | 1174 | 1590 | AM17927-SS-NL | 1373 | 1706 |
| AD12662 | AM17930-AS | 1175 | 1590 | AM17927-SS-NL | 1373 | 1706 |
| AD12663 | AM17931-AS | 1176 | 1590 | AM17927-SS-NL | 1373 | 1706 |
| AD12664 | AM17928-AS | 1173 | 1590 | AM17932-SS-NL | 1374 | 1706 |
| AD12665 | AM17929-AS | 1174 | 1590 | AM17932-SS-NL | 1374 | 1706 |
| AD12666 | AM17930-AS | 1175 | 1590 | AM17932-SS-NL | 1374 | 1706 |
| AD12667 | AM17931-AS | 1176 | 1590 | AM17932-SS-NL | 1374 | 1706 |
| AD12668 | AM17933-AS | 1177 | 1590 | AM17932-SS-NL | 1374 | 1706 |
| AD12669 | AM17934-AS | 1178 | 1590 | AM16676-SS-NL | 1368 | 1706 |
| AD13042 | AM18487-AS | 1179 | 1595 | AM18486-SS-NL | 1375 | 1710 |
| AD13043 | AM18489-AS | 1180 | 1596 | AM18488-SS-NL | 1376 | 1711 |
| AD13056 | AM16812-AS | 1170 | 1591 | AM18519-SS-NL | 1377 | 1770 |
| AD13057 | AM18520-AS | 1181 | 1591 | AM16811-SS-NL | 1369 | 1707 |
| AD13058 | AM18521-AS | 1182 | 1591 | AM16811-SS-NL | 1369 | 1707 |
| AD13059 | AM18523-AS | 1183 | 1591 | AM18522-SS-NL | 1378 | 1707 |
| AD13060 | AM18524-AS | 1184 | 1591 | AM18522-SS-NL | 1378 | 1707 |
| AD13061 | AM18525-AS | 1185 | 1591 | AM18522-SS-NL | 1378 | 1707 |
| AD13062 | AM18526-AS | 1186 | 1591 | AM18522-SS-NL | 1378 | 1707 |
| AD13063 | AM18524-AS | 1184 | 1591 | AM18527-SS-NL | 1379 | 1707 |
| AD13064 | AM18525-AS | 1185 | 1591 | AM18527-SS-NL | 1379 | 1707 |
| AD13065 | AM18526-AS | 1186 | 1591 | AM18527-SS-NL | 1379 | 1707 |
| AD14065 | AM17930-AS | 1175 | 1590 | AM16676-SS-NL | 1368 | 1706 |
| AD14135 | AM18523-AS | 1183 | 1591 | AM16811-SS-NL | 1369 | 1707 |
| AD14136 | AM19907-AS | 1187 | 1591 | AM16811-SS-NL | 1369 | 1707 |
| AD14137 | AM18524-AS | 1184 | 1591 | AM16811-SS-NL | 1369 | 1707 |
| AD14138 | AM18525-AS | 1185 | 1591 | AM16811-SS-NL | 1369 | 1707 |
| AD14139 | AM18526-AS | 1186 | 1591 | AM16811-SS-NL | 1369 | 1707 |
| AD14140 | AM19908-AS | 1188 | 1591 | AM16811-SS-NL | 1369 | 1707 |
| AD14141 | AM19909-AS | 1189 | 1591 | AM16811-SS-NL | 1369 | 1707 |
| AD14142 | AM19910-AS | 1190 | 1591 | AM16811-SS-NL | 1369 | 1707 |
| AD14143 | AM19911-AS | 1191 | 1591 | AM16811-SS-NL | 1369 | 1707 |
| AD14144 | AM19912-AS | 1192 | 1591 | AM16811-SS-NL | 1369 | 1707 |

TABLE 7A-2
IAV RNAi agent (targeting NS1) Duplexes with Corresponding Sense and Antisense
Strand ID Numbers and Sequence ID numbers for the modified and unmodified
nucleotide sequences. (Shown without Linking Agents or Conjugates)

| | | AS | AS | | SS | SS |
|---|---|---|---|---|---|---|
| | | modified | unmodified | | modified | unmodified |
| | | SEQ ID | SEQ ID | | SEQ ID | SEQ ID |
| Duplex | AS ID | NO: | NO: | SS ID | NO: | NO: |
| AD11159 | AM15547-AS | 1228 | 1613 | AM15869-SS-NL | 1380 | 1712 |
| AD11160 | AM15729-AS | 1242 | 1625 | AM15870-SS-NL | 1381 | 1713 |
| AD11161 | AM15872-AS | 1244 | 1621 | AM15871-SS-NL | 1382 | 1714 |
| AD11162 | AM15874-AS | 1245 | 1636 | AM15873-SS-NL | 1383 | 1715 |
| AD11164 | AM15877-AS | 1246 | 1607 | AM15876-SS-NL | 1384 | 1716 |
| AD11835 | AM15714-AS | 1234 | 1607 | AM16806-SS-NL | 1385 | 1716 |
| AD11836 | AM15548-AS | 1229 | 1613 | AM15869-SS-NL | 1380 | 1712 |
| AD12423 | AM17578-AS | 1247 | 1604 | AM17577-SS-NL | 1386 | 1717 |
| AD12424 | AM17580-AS | 1248 | 1605 | AM17579-SS-NL | 1387 | 1718 |
| AD12425 | AM17582-AS | 1249 | 1606 | AM17581-SS-NL | 1388 | 1719 |
| AD12426 | AM17584-AS | 1250 | 1608 | AM17583-SS-NL | 1389 | 1720 |
| AD12427 | AM17586-AS | 1251 | 1609 | AM17585-SS-NL | 1390 | 1721 |
| AD12428 | AM17588-AS | 1252 | 1610 | AM17587-SS-NL | 1391 | 1722 |
| AD12429 | AM17590-AS | 1253 | 1611 | AM17589-SS-NL | 1392 | 1723 |
| AD12430 | AM17592-AS | 1254 | 1612 | AM17591-SS-NL | 1393 | 1724 |
| AD12431 | AM17594-AS | 1255 | 1615 | AM17593-SS-NL | 1394 | 1725 |
| AD12432 | AM17596-AS | 1256 | 1618 | AM17595-SS-NL | 1395 | 1726 |
| AD12433 | AM17598-AS | 1257 | 1619 | AM17597-SS-NL | 1396 | 1727 |
| AD12434 | AM17600-AS | 1258 | 1623 | AM17599-SS-NL | 1397 | 1728 |
| AD13045 | AM18492-AS | 1259 | 1621 | AM15871-SS-NL | 1382 | 1714 |
| AD13046 | AM18493-AS | 1260 | 1636 | AM15873-SS-NL | 1383 | 1715 |
| AD13047 | AM15730-AS | 1243 | 1625 | AM15870-SS-NL | 1381 | 1713 |
| AD13400 | AM19062-AS | 1261 | 1628 | AM19061-SS-NL | 1398 | 1729 |
| AD13401 | AM19064-AS | 1262 | 1631 | AM19063-SS-NL | 1399 | 1730 |
| AD13402 | AM19066-AS | 1263 | 1632 | AM19065-SS-NL | 1400 | 1731 |
| AD13403 | AM19068-AS | 1264 | 1633 | AM19067-SS-NL | 1401 | 1732 |
| AD13404 | AM19070-AS | 1265 | 1616 | AM19069-SS-NL | 1402 | 1733 |
| AD13405 | AM19072-AS | 1266 | 1634 | AM19071-SS-NL | 1403 | 1734 |
| AD13406 | AM19074-AS | 1267 | 1622 | AM19073-SS-NL | 1404 | 1735 |
| AD13407 | AM19076-AS | 1268 | 1624 | AM19075-SS-NL | 1405 | 1736 |
| AD13408 | AM19078-AS | 1269 | 1637 | AM19077-SS-NL | 1406 | 1737 |
| AD11159 | AM15547-AS | 1228 | 1613 | AM15869-SS-NL | 1380 | 1712 |
| AD11160 | AM15729-AS | 1242 | 1625 | AM15870-SS-NL | 1381 | 1713 |
| AD11161 | AM15872-AS | 1244 | 1621 | AM15871-SS-NL | 1382 | 1714 |
| AD11162 | AM15874-AS | 1245 | 1636 | AM15873-SS-NL | 1383 | 1715 |
| AD11164 | AM15877-AS | 1246 | 1607 | AM15876-SS-NL | 1384 | 1716 |
| AD11835 | AM15714-AS | 1234 | 1607 | AM16806-SS-NL | 1385 | 1716 |
| AD11836 | AM15548-AS | 1229 | 1613 | AM15869-SS-NL | 1380 | 1712 |
| AD12423 | AM17578-AS | 1247 | 1604 | AM17577-SS-NL | 1386 | 1717 |
| AD12424 | AM17580-AS | 1248 | 1605 | AM17579-SS-NL | 1387 | 1718 |
| AD12425 | AM17582-AS | 1249 | 1606 | AM17581-SS-NL | 1388 | 1719 |
| AD12426 | AM17584-AS | 1250 | 1608 | AM17583-SS-NL | 1389 | 1720 |
| AD12427 | AM17586-AS | 1251 | 1609 | AM17585-SS-NL | 1390 | 1721 |
| AD12428 | AM17588-AS | 1252 | 1610 | AM17587-SS-NL | 1391 | 1722 |

TABLE 7A-3
IAV RNAi agent (targeting PB1) Duplexes with Corresponding Sense and Antisense
Strand ID Numbers and Sequence ID numbers for the modified and unmodified
nucleotide sequences. (Shown without Linking Agents or Conjugates)

| | | AS | AS | | SS | SS |
|---|---|---|---|---|---|---|
| | | modified | unmodified | | modified | unmodified |
| | | SEQ ID | SEQ ID | | SEQ ID | SEQ ID |
| Duplex | AS ID | NO: | NO: | SS ID | NO: | NO: |
| AD11292 | AM16046-AS | 1295 | 1642 | AM16045-SS-NL | 1407 | 1738 |
| AD11293 | AM16048-AS | 1296 | 1658 | AM16047-SS-NL | 1408 | 1739 |
| AD11294 | AM16050-AS | 1297 | 1657 | AM16049-SS-NL | 1409 | 1740 |
| AD11736 | AM16683-AS | 1298 | 1655 | AM16682-SS-NL | 1410 | 1741 |
| AD12421 | AM17574-AS | 1299 | 1663 | AM17573-SS-NL | 1411 | 1742 |
| AD12620 | AM16683-AS | 1298 | 1655 | AM17856-SS-NL | 1412 | 1741 |
| AD13049 | AM18497-AS | 1300 | 1641 | AM18496-SS-NL | 1413 | 1743 |
| AD13411 | AM19084-AS | 1301 | 1665 | AM19083-SS-NL | 1414 | 1744 |

TABLE 7A-4
IAV RNAi agent (targeting PB2) Duplexes with Corresponding Sense and Antisense
Strand ID Numbers and Sequence ID numbers for the modified and unmodified
nucleotide sequences. (Shown without Linking Agents or Conjugates)

| | | AS | AS | | SS | SS |
|---|---|---|---|---|---|---|
| | | modified | unmodified | | modified | unmodified |
| | | SEQ ID | SEQ ID | | SEQ ID | SEQ ID |
| Duplex | AS ID | NO: | NO: | SS ID | NO: | NO: |
| AD11737 | AM16685-AS | 1314 | 1676 | AM16684-SS-NL | 1415 | 1745 |
| AD12249 | AM17367-AS | 1315 | 1665 | AM17366-SS-NL | 1416 | 1746 |
| AD12250 | AM17369-AS | 1316 | 1666 | AM17368-SS-NL | 1417 | 1747 |
| AD12251 | AM17371-AS | 1317 | 1667 | AM17370-SS-NL | 1418 | 1748 |
| AD12422 | AM17576-AS | 1318 | 1669 | AM17575-SS-NL | 1419 | 1749 |
| AD12621 | AM16685-AS | 1314 | 1676 | AM17857-SS-NL | 1420 | 1745 |
| AD13050 | AM18499-AS | 1319 | 1668 | AM18498-SS-NL | 1421 | 1750 |
| AD13412 | AM19086-AS | 1320 | 1675 | AM19085-SS-NL | 1422 | 1751 |

TABLE 7A-5
IAV RNAi agent (targeting NP) Duplexes with Corresponding Sense and Antisense
Strand ID Numbers and Sequence ID numbers for the modified and unmodified
nucleotide sequences. (Shown without Linking Agents or Conjugates)

| | | AS | AS | | SS | SS |
|---|---|---|---|---|---|---|
| | | modified | unmodified | | modified | unmodified |
| | | SEQ ID | SEQ ID | | SEQ ID | SEQ ID |
| Duplex | AS ID | NO: | NO: | SS ID | NO: | NO: |
| AD11738 | AM16687-AS | 1337 | 1691 | AM16686-SS-NL | 1423 | 1752 |
| AD12252 | AM17373-AS | 1338 | 1682 | AM17372-SS-NL | 1424 | 1753 |
| AD12253 | AM17375-AS | 1339 | 1678 | AM17374-SS-NL | 1425 | 1754 |
| AD12419 | AM17570-AS | 1340 | 1683 | AM17569-SS-NL | 1426 | 1755 |
| AD12622 | AM16687-AS | 1337 | 1691 | AM17858-SS-NL | 1427 | 1752 |
| AD13044 | AM18491-AS | 1341 | 1677 | AM18490-SS-NL | 1428 | 1756 |
| AD13395 | AM19052-AS | 1342 | 1679 | AM19051-SS-NL | 1429 | 1757 |
| AD13396 | AM19054-AS | 1343 | 1681 | AM19053-SS-NL | 1430 | 1758 |
| AD13397 | AM19056-AS | 1344 | 1686 | AM19055-SS-NL | 1431 | 1759 |
| AD13398 | AM19058-AS | 1345 | 1688 | AM19057-SS-NL | 1432 | 1760 |
| AD13399 | AM19060-AS | 1346 | 1692 | AM19059-SS-NL | 1433 | 1761 |

TABLE 7A-6
IAV RNAi agent (targeting PA) Duplexes with Corresponding Sense and Antisense
Strand ID Numbers and Sequence ID numbers for the modified and unmodified
nucleotide sequences. (Shown without Linking Agents or Conjugates)

| | | AS | AS | | SS | SS |
|---|---|---|---|---|---|---|
| | | modified | unmodified | | modified | unmodified |
| | | SEQ ID | SEQ ID | | SEQ ID | SEQ ID |
| Duplex | AS ID | NO: | NO: | SS ID | NO: | NO: |
| AD11734 | AM16679-AS | 1360 | 1693 | AM16678-SS-NL | 1434 | 1762 |
| AD11735 | AM16681-AS | 1361 | 1701 | AM16680-SS-NL | 1435 | 1763 |
| AD11837 | AM16808-AS | 1362 | 1696 | AM16807-SS-NL | 1436 | 1771 |
| AD11838 | AM16810-AS | 1363 | 1702 | AM16809-SS-NL | 1437 | 1765 |
| AD12420 | AM17572-AS | 1364 | 1705 | AM17571-SS-NL | 1438 | 1766 |
| AD12623 | AM16679-AS | 1360 | 1396 | AM17859-SS-NL | 1439 | 1762 |
| AD12624 | AM16681-AS | 1361 | 1701 | AM17860-SS-NL | 1440 | 1763 |
| AD13048 | AM18495-AS | 1365 | 1694 | AM18494-SS-NL | 1441 | 1767 |
| AD13409 | AM19080-AS | 1366 | 1699 | AM19079-SS-NL | 1442 | 1768 |
| AD13410 | AM19082-AS | 1367 | 1704 | AM19081-SS-NL | 1443 | 1772 |

TABLE 7B-1
IAV RNAi agent (targeting M1) Duplexes with Corresponding
Sense and Antisense Strand ID Numbers and Sequence ID numbers
for the modified and unmodified nucleotide sequences.

| | | AS | AS | | SS | SS |
|---|---|---|---|---|---|---|
| | | modified | unmodified | | modified | unmodified |
| | | SEQ ID | SEQ ID | | SEQ ID | SEQ ID |
| Duplex | AS ID | NO: | NO: | SS ID | NO: | NO: |
| AD11733 | AM16677-AS | 1169 | 1590 | AM16676-SS | 1444 | 1706 |
| AD11839 | AM16812-AS | 1170 | 1591 | AM16811-SS | 1445 | 1707 |
| AD12417 | AM17566-AS | 1171 | 1602 | AM17565-SS | 1446 | 1708 |
| AD12418 | AM17568-AS | 1172 | 1603 | AM17567-SS | 1447 | 1709 |
| AD12619 | AM16677-AS | 1169 | 1590 | AM17855-SS | 1448 | 1706 |
| AD12660 | AM17928-AS | 1173 | 1590 | AM17927-SS | 1449 | 1706 |
| AD12661 | AM17929-AS | 1174 | 1590 | AM17927-SS | 1449 | 1706 |
| AD12662 | AM17930-AS | 1175 | 1590 | AM17927-SS | 1449 | 1706 |
| AD12663 | AM17931-AS | 1176 | 1590 | AM17927-SS | 1449 | 1706 |
| AD12664 | AM17928-AS | 1173 | 1590 | AM17932-SS | 1450 | 1706 |
| AD12665 | AM17929-AS | 1174 | 1590 | AM17932-SS | 1450 | 1706 |
| AD12666 | AM17930-AS | 1175 | 1590 | AM17932-SS | 1450 | 1706 |
| AD12667 | AM17931-AS | 1176 | 1590 | AM17932-SS | 1450 | 1706 |
| AD12668 | AM17933-AS | 1177 | 1590 | AM17932-SS | 1450 | 1706 |
| AD12669 | AM17934-AS | 1178 | 1590 | AM16676-SS | 1444 | 1706 |
| AD13042 | AM18487-AS | 1179 | 1595 | AM18486-SS | 1451 | 1710 |
| AD13043 | AM18489-AS | 1180 | 1596 | AM18488-SS | 1452 | 1711 |
| AD13056 | AM16812-AS | 1170 | 1591 | AM18519-SS | 1453 | 1770 |
| AD13057 | AM18520-AS | 1181 | 1591 | AM16811-SS | 1445 | 1707 |
| AD13058 | AM18521-AS | 1182 | 1591 | AM16811-SS | 1445 | 1707 |
| AD13059 | AM18523-AS | 1183 | 1591 | AM18522-SS | 1454 | 1707 |
| AD13060 | AM18524-AS | 1184 | 1591 | AM18522-SS | 1454 | 1707 |
| AD13061 | AM18525-AS | 1185 | 1591 | AM18522-SS | 1454 | 1707 |
| AD13062 | AM18526-AS | 1186 | 1591 | AM18522-SS | 1454 | 1707 |
| AD13063 | AM18524-AS | 1184 | 1591 | AM18527-SS | 1455 | 1707 |
| AD13064 | AM18525-AS | 1185 | 1591 | AM18527-SS | 1455 | 1707 |
| AD13065 | AM18526-AS | 1186 | 1591 | AM18527-SS | 1455 | 1707 |
| AD14065 | AM17930-AS | 1175 | 1590 | AM16676-SS | 1444 | 1706 |
| AD14135 | AM18523-AS | 1183 | 1591 | AM16811-SS | 1445 | 1707 |
| AD14136 | AM19907-AS | 1187 | 1591 | AM16811-SS | 1445 | 1707 |
| AD14137 | AM18524-AS | 1184 | 1591 | AM16811-SS | 1445 | 1707 |
| AD14138 | AM18525-AS | 1185 | 1591 | AM16811-SS | 1445 | 1707 |
| AD14139 | AM18526-AS | 1186 | 1591 | AM16811-SS | 1445 | 1707 |
| AD14140 | AM19908-AS | 1188 | 1591 | AM16811-SS | 1445 | 1707 |
| AD14141 | AM19909-AS | 1189 | 1591 | AM16811-SS | 1445 | 1707 |
| AD14142 | AM19910-AS | 1190 | 1591 | AM16811-SS | 1445 | 1707 |
| AD14143 | AM19911-AS | 1191 | 1591 | AM16811-SS | 1445 | 1707 |
| AD14144 | AM19912-AS | 1192 | 1591 | AM16811-SS | 1445 | 1707 |

TABLE 7B-2
IAV RNAi agent (targeting NS1) Duplexes with Corresponding
Sense and Antisense Strand ID Numbers and Sequence ID numbers
for the modified and unmodified nucleotide sequences.

| | | AS | AS | | SS | SS |
|---|---|---|---|---|---|---|
| | | modified | unmodified | | modified | unmodified |
| | | SEQ ID | SEQ ID | | SEQ ID | SEQ ID |
| Duplex | AS ID | NO: | NO: | SS ID | NO: | NO: |
| AD11159 | AM15547-AS | 1228 | 1613 | AM15869-SS | 1456 | 1712 |
| AD11160 | AM15729-AS | 1242 | 1625 | AM15870-SS | 1457 | 1713 |
| AD11161 | AM15872-AS | 1244 | 1621 | AM15871-SS | 1458 | 1714 |
| AD11162 | AM15874-AS | 1245 | 1636 | AM15873-SS | 1459 | 1715 |
| AD11164 | AM15877-AS | 1246 | 1607 | AM15876-SS | 1460 | 1716 |
| AD11835 | AM15714-AS | 1234 | 1607 | AM16806-SS | 1461 | 1716 |
| AD11836 | AM15548-AS | 1229 | 1613 | AM15869-SS | 1456 | 1712 |
| AD12423 | AM17578-AS | 1247 | 1604 | AM17577-SS | 1462 | 1717 |
| AD12424 | AM17580-AS | 1248 | 1605 | AM17579-SS | 1463 | 1718 |
| AD12425 | AM17582-AS | 1249 | 1606 | AM17581-SS | 1464 | 1719 |
| AD12426 | AM17584-AS | 1250 | 1608 | AM17583-SS | 1465 | 1720 |
| AD12427 | AM17586-AS | 1251 | 1609 | AM17585-SS | 1466 | 1721 |
| AD12428 | AM17588-AS | 1252 | 1610 | AM17587-SS | 1467 | 1722 |
| AD12429 | AM17590-AS | 1253 | 1611 | AM17589-SS | 1468 | 1723 |
| AD12430 | AM17592-AS | 1254 | 1612 | AM17591-SS | 1469 | 1724 |
| AD12431 | AM17594-AS | 1255 | 1615 | AM17593-SS | 1470 | 1725 |
| AD12432 | AM17596-AS | 1256 | 1618 | AM17595-SS | 1471 | 1726 |
| AD12433 | AM17598-AS | 1257 | 1619 | AM17597-SS | 1472 | 1727 |
| AD12434 | AM17600-AS | 1258 | 1623 | AM17599-SS | 1473 | 1728 |
| AD13045 | AM18492-AS | 1259 | 1621 | AM15871-SS | 1458 | 1714 |
| AD13046 | AM18493-AS | 1260 | 1636 | AM15873-SS | 1459 | 1715 |
| AD13047 | AM15730-AS | 1243 | 1625 | AM15870-SS | 1457 | 1713 |
| AD13400 | AM19062-AS | 1261 | 1628 | AM19061-SS | 1474 | 1729 |
| AD13401 | AM19064-AS | 1262 | 1631 | AM19063-SS | 1475 | 1730 |
| AD13402 | AM19066-AS | 1263 | 1632 | AM19065-SS | 1476 | 1731 |
| AD13403 | AM19068-AS | 1264 | 1633 | AM19067-SS | 1477 | 1732 |
| AD13404 | AM19070-AS | 1265 | 1616 | AM19069-SS | 1478 | 1733 |
| AD13405 | AM19072-AS | 1266 | 1634 | AM19071-SS | 1479 | 1734 |
| AD13406 | AM19074-AS | 1267 | 1622 | AM19073-SS | 1480 | 1735 |
| AD13407 | AM19076-AS | 1268 | 1624 | AM19075-SS | 1481 | 1736 |
| AD13408 | AM19078-AS | 1269 | 1637 | AM19077-SS | 1482 | 1737 |

TABLE 7B-3
IAV RNAi agent (targeting PB1) Duplexes with Corresponding
Sense and Antisense Strand ID Numbers and Sequence ID numbers
for the modified and unmodified nucleotide sequences.

| | | AS | AS | | SS | SS |
|---|---|---|---|---|---|---|
| | | modified | unmodified | | modified | unmodified |
| | | SEQ ID | SEQ ID | | SEQ ID | SEQ ID |
| Duplex | AS ID | NO: | NO: | SS ID | NO: | NO: |
| AD11292 | AM16046-AS | 1295 | 1642 | AM16045-SS | 1483 | 1738 |
| AD11293 | AM16048-AS | 1296 | 1658 | AM16047-SS | 1484 | 1739 |
| AD11294 | AM16050-AS | 1297 | 1657 | AM16049-SS | 1485 | 1740 |
| AD11736 | AM16683-AS | 1298 | 1655 | AM16682-SS | 1486 | 1741 |
| AD12421 | AM17574-AS | 1299 | 1663 | AM17573-SS | 1487 | 1742 |
| AD12620 | AM16683-AS | 1298 | 1655 | AM17856-SS | 1488 | 1741 |
| AD13049 | AM18497-AS | 1300 | 1641 | AM18496-SS | 1489 | 1743 |
| AD13411 | AM19084-AS | 1301 | 1665 | AM19083-SS | 1490 | 1744 |

TABLE 7B-4
IAV RNAi agent (targeting PB2) Duplexes with Corresponding
Sense and Antisense Strand ID Numbers and Sequence ID numbers
for the modified and unmodified nucleotide sequences.

| | | AS | AS | | SS | SS |
|---|---|---|---|---|---|---|
| | | modified | unmodified | | modified | unmodified |
| | | SEQ ID | SEQ ID | | SEQ ID | SEQ ID |
| Duplex | AS ID | NO: | NO: | SS ID | NO: | NO: |
| AD11737 | AM16685-AS | 1314 | 1676 | AM16684-SS | 1491 | 1745 |
| AD12249 | AM17367-AS | 1315 | 1665 | AM17366-SS | 1492 | 1746 |
| AD12250 | AM17369-AS | 1316 | 1666 | AM17368-SS | 1493 | 1747 |
| AD12251 | AM17371-AS | 1317 | 1667 | AM17370-SS | 1494 | 1748 |
| AD12422 | AM17576-AS | 1318 | 1669 | AM17575-SS | 1495 | 1749 |
| AD12621 | AM16685-AS | 1314 | 1676 | AM17857-SS | 1496 | 1745 |
| AD13050 | AM18499-AS | 1319 | 1668 | AM18498-SS | 1497 | 1750 |
| AD13412 | AM19086-AS | 1320 | 1675 | AM19085-SS | 1498 | 1751 |

TABLE 7B-5
IAV RNAi agent (targeting NP) Duplexes with Corresponding Sense and Antisense Strand ID
Numbers and Sequence ID numbers for the modified and unmodified nucleotide sequences.

| | | AS | AS | | SS | SS |
|---|---|---|---|---|---|---|
| | | modified | unmodified | | modified | unmodified |
| | | SEQ ID | SEQ ID | | SEQ ID | SEQ ID |
| Duplex | AS ID | NO: | NO: | SS ID | NO: | NO: |
| AD11738 | AM16687-AS | 1337 | 1691 | AM16686-SS | 1499 | 1752 |
| AD12252 | AM17373-AS | 1338 | 1682 | AM17372-SS | 1500 | 1753 |
| AD12253 | AM17375-AS | 1339 | 1678 | AM17374-SS | 1501 | 1754 |
| AD12419 | AM17570-AS | 1340 | 1683 | AM17569-SS | 1502 | 1755 |
| AD12622 | AM16687-AS | 1337 | 1691 | AM17858-SS | 1503 | 1752 |
| AD13044 | AM18491-AS | 1341 | 1677 | AM18490-SS | 1504 | 1756 |
| AD13395 | AM19052-AS | 1342 | 1679 | AM19051-SS | 1505 | 1757 |
| AD13396 | AM19054-AS | 1343 | 1681 | AM19053-SS | 1506 | 1758 |
| AD13397 | AM19056-AS | 1344 | 1686 | AM19055-SS | 1507 | 1759 |
| AD13398 | AM19058-AS | 1345 | 1688 | AM19057-SS | 1508 | 1760 |
| AD13399 | AM19060-AS | 1346 | 1692 | AM19059-SS | 1509 | 1761 |

TABLE 7B-6
IAV RNAi agent (targeting PA) Duplexes with Corresponding Sense and Antisense Strand ID
Numbers and Sequence ID numbers for the modified and unmodified nucleotide sequences.

| | | AS | AS | | SS | SS |
|---|---|---|---|---|---|---|
| | | modified | unmodified | | modified | unmodified |
| | | SEQ ID | SEQ ID | | SEQ ID | SEQ ID |
| Duplex | AS ID | NO: | NO: | SS ID | NO: | NO: |
| AD11734 | AM16679-AS | 1360 | 1693 | AM16678-SS | 1510 | 1762 |
| AD11735 | AM16681-AS | 1361 | 1701 | AM16680-SS | 1511 | 1763 |
| AD11837 | AM16808-AS | 1362 | 1696 | AM16807-SS | 1512 | 1771 |
| AD11838 | AM16810-AS | 1363 | 1702 | AM16809-SS | 1513 | 1765 |
| AD12420 | AM17572-AS | 1364 | 1705 | AM17571-SS | 1514 | 1766 |
| AD12623 | AM16679-AS | 1360 | 1693 | AM17859-SS | 1515 | 1762 |
| AD12624 | AM16681-AS | 1361 | 1701 | AM17860-SS | 1516 | 1763 |
| AD13048 | AM18495-AS | 1365 | 1694 | AM18494-SS | 1517 | 1767 |
| AD13409 | AM19080-AS | 1366 | 1699 | AM19079-SS | 1518 | 1768 |
| AD13410 | AM19082-AS | 1367 | 1704 | AM19081-SS | 1519 | 1772 |

TABLE 8A
IAV RNAi agent Duplexes (targeting M1) with Corresponding Sense and
Antisense Strand ID Numbers and Sequence ID numbers for the modified and
unmodified nucleotide sequences. (Shown with Targeting Ligand Conjugates)

| | | AS | AS | | SS | SS |
|---|---|---|---|---|---|---|
| | | modified | unmodified | | modified | unmodified |
| | | SEQ ID | SEQ ID | | SEQ ID | SEQ ID |
| Duplex | AS ID | NO: | NO: | SS ID | NO: | NO: |
| AC002564 | AM16677-AS | 1169 | 1590 | CS003268 | 1520 | 1706 |
| AC002601 | AM16812-AS | 1170 | 1591 | CS003315 | 1521 | 1707 |
| AC002754 | AM17566-AS | 1171 | 1602 | CS003507 | 1522 | 1708 |
| AC002755 | AM17568-AS | 1172 | 1603 | CS003509 | 1523 | 1709 |
| AC002863 | AM17928-AS | 1173 | 1590 | CS003633 | 1524 | 1706 |
| AC002864 | AM17929-AS | 1174 | 1590 | CS003633 | 1524 | 1706 |
| AC002865 | AM17930-AS | 1175 | 1590 | CS003633 | 1524 | 1706 |
| AC002866 | AM17931-AS | 1176 | 1590 | CS003633 | 1524 | 1706 |
| AC002867 | AM17928-AS | 1173 | 1590 | CS003638 | 1525 | 1706 |
| AC002868 | AM17929-AS | 1174 | 1590 | CS003638 | 1525 | 1706 |
| AC002869 | AM17930-AS | 1175 | 1590 | CS003638 | 1525 | 1706 |
| AC002870 | AM17931-AS | 1176 | 1590 | CS003638 | 1525 | 1706 |
| AC002871 | AM17933-AS | 1177 | 1590 | CS003638 | 1525 | 1706 |
| AC002872 | AM17934-AS | 1178 | 1590 | CS003268 | 1520 | 1706 |
| AC002902 | AM18487-AS | 1179 | 1595 | CS003670 | 1526 | 1710 |
| AC002903 | AM18489-AS | 1180 | 1596 | CS003672 | 1527 | 1711 |
| AC002925 | AM16812-AS | 1170 | 1591 | CS003699 | 1528 | 1770 |
| AC002926 | AM18520-AS | 1181 | 1591 | CS003315 | 1521 | 1707 |
| AC002927 | AM18521-AS | 1182 | 1591 | CS003315 | 1521 | 1707 |
| AC002928 | AM18523-AS | 1183 | 1591 | CS003702 | 1529 | 1707 |
| AC002929 | AM18524-AS | 1184 | 1591 | CS003702 | 1529 | 1707 |
| AC002930 | AM18525-AS | 1185 | 1591 | CS003702 | 1529 | 1707 |
| AC002931 | AM18526-AS | 1186 | 1591 | CS003702 | 1529 | 1707 |
| AC002932 | AM18524-AS | 1184 | 1591 | CS003707 | 1530 | 1707 |
| AC002933 | AM18525-AS | 1185 | 1591 | CS003707 | 1530 | 1707 |
| AC002934 | AM18526-AS | 1186 | 1591 | CS003707 | 1530 | 1707 |
| AC003274 | AM17930-AS | 1175 | 1590 | CS003268 | 1520 | 1706 |
| AC003405 | AM18523-AS | 1183 | 1591 | CS003315 | 1521 | 1707 |
| AC003406 | AM19907-AS | 1187 | 1591 | CS003315 | 1521 | 1707 |
| AC003407 | AM18524-AS | 1184 | 1591 | CS003315 | 1521 | 1707 |
| AC003408 | AM18525-AS | 1185 | 1591 | CS003315 | 1521 | 1707 |
| AC003409 | AM18526-AS | 1186 | 1591 | CS003315 | 1521 | 1707 |
| AC003410 | AM19908-AS | 1188 | 1591 | CS003315 | 1521 | 1707 |
| AC003411 | AM19909-AS | 1189 | 1591 | CS003315 | 1521 | 1707 |
| AC003412 | AM19910-AS | 1190 | 1591 | CS003315 | 1521 | 1707 |
| AC003413 | AM19911-AS | 1191 | 1591 | CS003315 | 1521 | 1707 |
| AC003414 | AM19912-AS | 1192 | 1591 | CS003315 | 1521 | 1707 |

TABLE 8B
IAV RNAi agent Duplexes (targeting NS1) with Corresponding Sense and
Antisense Strand ID Numbers and Sequence ID numbers for the modified and unmodified
nucleotide sequences. (Shown with Targeting Ligand Conjugates)

| | | AS | AS | | SS | SS |
|---|---|---|---|---|---|---|
| | | modified | unmodified | | modified | unmodified |
| | | SEQ ID | SEQ ID | | SEQ ID | SEQ ID |
| Duplex | AS ID | NO: | NO: | SS ID | NO: | NO: |
| AC002317 | AM15547-AS | 1228 | 1613 | CS002930 | 1531 | 1712 |
| AC002318 | AM15729-AS | 1242 | 1625 | CS002932 | 1532 | 1713 |
| AC002319 | AM15872-AS | 1244 | 1621 | CS002934 | 1533 | 1714 |
| AC002320 | AM15874-AS | 1245 | 1636 | CS002936 | 1534 | 1715 |
| AC002322 | AM15877-AS | 1246 | 1607 | CS002939 | 1535 | 1716 |
| AC002597 | AM15714-AS | 1234 | 1607 | CS003308 | 1536 | 1716 |
| AC002598 | AM15548-AS | 1229 | 1613 | CS002930 | 1531 | 1712 |
| AC002760 | AM17578-AS | 1247 | 1604 | CS003519 | 1537 | 1717 |
| AC002761 | AM17580-AS | 1248 | 1605 | CS003521 | 1538 | 1718 |
| AC002762 | AM17582-AS | 1249 | 1606 | CS003523 | 1539 | 1719 |
| AC002763 | AM17584-AS | 1250 | 1608 | CS003525 | 1540 | 1720 |
| AC002764 | AM17586-AS | 1251 | 1609 | CS003527 | 1541 | 1721 |
| AC002765 | AM17588-AS | 1252 | 1610 | CS003529 | 1542 | 1722 |
| AC002766 | AM17590-AS | 1253 | 1611 | CS003531 | 1543 | 1723 |
| AC002767 | AM17592-AS | 1254 | 1612 | CS003533 | 1544 | 1724 |
| AC002768 | AM17594-AS | 1255 | 1615 | CS003535 | 1545 | 1725 |
| AC002769 | AM17596-AS | 1256 | 1618 | CS003537 | 1546 | 1726 |
| AC002770 | AM17598-AS | 1257 | 1619 | CS003539 | 1547 | 1727 |
| AC002771 | AM17600-AS | 1258 | 1623 | CS003541 | 1548 | 1728 |
| AC002905 | AM18492-AS | 1259 | 1621 | CS002934 | 1533 | 1714 |
| AC002906 | AM18493-AS | 1260 | 1636 | CS002936 | 1534 | 1715 |
| AC002907 | AM15730-AS | 1243 | 1625 | CS002932 | 1532 | 1713 |
| AC003112 | AM19062-AS | 1261 | 1628 | CS003925 | 1549 | 1729 |
| AC003113 | AM19064-AS | 1262 | 1631 | CS003927 | 1550 | 1730 |
| AC003114 | AM19066-AS | 1263 | 1632 | CS003929 | 1551 | 1731 |
| AC003115 | AM19068-AS | 1264 | 1633 | CS003931 | 1552 | 1732 |
| AC003116 | AM19070-AS | 1265 | 1616 | CS003933 | 1553 | 1733 |
| AC003117 | AM19072-AS | 1266 | 1634 | CS003935 | 1554 | 1734 |
| AC003118 | AM19074-AS | 1267 | 1622 | CS003937 | 1555 | 1735 |
| AC003119 | AM19076-AS | 1268 | 1624 | CS003939 | 1556 | 1736 |
| AC003120 | AM19078-AS | 1269 | 1637 | CS003941 | 1557 | 1737 |

TABLE 8C
IAV RNAi agent Duplexes (targeting PB1) with Corresponding Sense and
Antisense Strand ID Numbers and Sequence ID numbers for the modified and unmodified
nucleotide sequences. (Shown with Targeting Ligand Conjugates)

| | | AS | AS | | SS | SS |
|---|---|---|---|---|---|---|
| | | modified | unmodified | | modified | unmodified |
| | | SEQ ID | SEQ ID | | SEQ ID | SEQ ID |
| Duplex | AS ID | NO: | NO: | SS ID | NO: | NO: |
| AC002367 | AM16046-AS | 1295 | 1642 | CS003004 | 1558 | 1738 |
| AC002368 | AM16048-AS | 1296 | 1658 | CS003006 | 1559 | 1739 |
| AC002369 | AM16050-AS | 1297 | 1657 | CS003008 | 1560 | 1740 |
| AC002567 | AM16683-AS | 1298 | 1655 | CS003274 | 1561 | 1741 |
| AC002758 | AM17574-AS | 1299 | 1663 | CS003515 | 1562 | 1742 |
| AC002909 | AM18497-AS | 1300 | 1641 | CS003681 | 1563 | 1743 |
| AC003123 | AM19084-AS | 1301 | 1665 | CS003947 | 1564 | 1744 |

TABLE 8D
IAV RNAi agent Duplexes (targeting PB2) with Corresponding Sense and
Antisense Strand ID Numbers and Sequence ID numbers for the modified and unmodified
nucleotide sequences. (Shown with Targeting Ligand Conjugates)

| | | AS | AS | | SS | SS |
|---|---|---|---|---|---|---|
| | | modified | unmodified | | modified | unmodified |
| | | SEQ ID | SEQ ID | | SEQ ID | SEQ ID |
| Duplex | AS ID | NO: | NO: | SS ID | NO: | NO: |
| AC002568 | AM16685-AS | 1314 | 1676 | CS003276 | 1565 | 1745 |
| AC002682 | AM17367-AS | 1315 | 1665 | CS003407 | 1566 | 1746 |
| AC002683 | AM17369-AS | 1316 | 1666 | CS003409 | 1567 | 1747 |
| AC002684 | AM17371-AS | 1317 | 1667 | CS003411 | 1568 | 1748 |
| AC002759 | AM17576-AS | 1318 | 1669 | CS003517 | 1569 | 1749 |
| AC002910 | AM18499-AS | 1319 | 1668 | CS003683 | 1570 | 1750 |
| AC003124 | AM19086-AS | 1320 | 1675 | CS003949 | 1571 | 1751 |

TABLE 8E
IAV RNAi agent Duplexes (targeting NP) with Corresponding Sense and
Antisense Strand ID Numbers and Sequence ID numbers for the modified and unmodified
nucleotide sequences. (Shown with Targeting Ligand Conjugates)

| | | AS | AS | | SS | SS |
|---|---|---|---|---|---|---|
| | | modified | unmodified | | modified | unmodified |
| | | SEQ ID | SEQ ID | | SEQ ID | SEQ ID |
| Duplex | AS ID | NO: | NO: | SS ID | NO: | NO: |
| AC002569 | AM16687-AS | 1337 | 1691 | CS003278 | 1572 | 1752 |
| AC002685 | AM17373-AS | 1338 | 1682 | CS003413 | 1573 | 1753 |
| AC002686 | AM17375-AS | 1339 | 1678 | CS003415 | 1574 | 1754 |
| AC002756 | AM17570-AS | 1340 | 1683 | CS003511 | 1575 | 1755 |
| AC002904 | AM18491-AS | 1341 | 1677 | CS003674 | 1576 | 1756 |
| AC003107 | AM19052-AS | 1342 | 1679 | CS003915 | 1577 | 1757 |
| AC003108 | AM19054-AS | 1343 | 1681 | CS003917 | 1578 | 1758 |
| AC003109 | AM19056-AS | 1344 | 1686 | CS003919 | 1579 | 1759 |
| AC003110 | AM19058-AS | 1345 | 1688 | CS003921 | 1580 | 1760 |
| AC003111 | AM19060-AS | 1346 | 1692 | CS003923 | 1581 | 1761 |

TABLE 8F
IAV RNAi agent Duplexes (targeting PA) with Corresponding Sense and
Antisense Strand ID Numbers and Sequence ID numbers for the modified and unmodified
nucleotide sequences. (Shown with Targeting Ligand Conjugates)

| | | AS | AS | | SS | SS |
|---|---|---|---|---|---|---|
| | | modified | unmodified | | modified | unmodified |
| | | SEQ ID | SEQ ID | | SEQ ID | SEQ ID |
| Duplex | AS ID | NO: | NO: | SS ID | NO: | NO: |
| AC002565 | AM16679-AS | 1360 | 1693 | CS003270 | 1582 | 1762 |
| AC002566 | AM16681-AS | 1361 | 1701 | CS003272 | 1583 | 1763 |
| AC002599 | AM16808-AS | 1362 | 1696 | CS003311 | 1584 | 1771 |
| AC002600 | AM16810-AS | 1363 | 1702 | CS003313 | 1585 | 1765 |
| AC002757 | AM17572-AS | 1364 | 1705 | CS003513 | 1586 | 1766 |
| AC002908 | AM18495-AS | 1365 | 1694 | CS003679 | 1587 | 1767 |
| AC003121 | AM19080-AS | 1366 | 1699 | CS003943 | 1588 | 1768 |
| AC003122 | AM19082-AS | 1367 | 1704 | CS003945 | 1589 | 1772 |

TABLE 9A
RNAi Agent (targeting M1) Conjugate Duplex ID Numbers Referencing
Position Targeted on Influenza A viral Genome

| | | | | Targeted |
|---|---|---|---|---|
| | | | | Influenza A |
| | | | | viral genome |
| | | | Duplex ID | Viral Genome |
| Conjugate | | | (Pre- | Position (Of SEQ |
| Duplex ID | AS ID | SS ID | Conjugation) | ID NO: 1) |
| AC002564 | AM16677-AS | CS003268 | AD11733 | 10 |
| AC002601 | AM16812-AS | CS003315 | AD11839 | 25 |
| AC002754 | AM17566-AS | CS003507 | AD12417 | 944 |
| AC002755 | AM17568-AS | CS003509 | AD12418 | 945 |
| AC002863 | AM17928-AS | CS003633 | AD12660 | 10 |
| AC002864 | AM17929-AS | CS003633 | AD12661 | 10 |
| AC002865 | AM17930-AS | CS003633 | AD12662 | 10 |
| AC002866 | AM17931-AS | CS003633 | AD12663 | 10 |
| AC002867 | AM17928-AS | CS003638 | AD12664 | 10 |
| AC002868 | AM17929-AS | CS003638 | AD12665 | 10 |
| AC002869 | AM17930-AS | CS003638 | AD12666 | 10 |
| AC002870 | AM17931-AS | CS003638 | AD12667 | 10 |
| AC002871 | AM17933-AS | CS003638 | AD12668 | 10 |
| AC002872 | AM17934-AS | CS003268 | AD12669 | 10 |
| AC002902 | AM18487-AS | CS003670 | AD13042 | 267 |
| AC002903 | AM18489-AS | CS003672 | AD13043 | 271 |
| AC002925 | AM16812-AS | CS003699 | AD13056 | 25 |
| AC002926 | AM18520-AS | CS003315 | AD13057 | 25 |
| AC002927 | AM18521-AS | CS003315 | AD13058 | 25 |
| AC002928 | AM18523-AS | CS003702 | AD13059 | 25 |
| AC002929 | AM18524-AS | CS003702 | AD13060 | 25 |
| AC002930 | AM18525-AS | CS003702 | AD13061 | 25 |
| AC002931 | AM18526-AS | CS003702 | AD13062 | 25 |
| AC002932 | AM18524-AS | CS003707 | AD13063 | 25 |
| AC002933 | AM18525-AS | CS003707 | AD13064 | 25 |
| AC002934 | AM18526-AS | CS003707 | AD13065 | 25 |
| AC003274 | AM17930-AS | CS003268 | AD14065 | 10 |
| AC003405 | AM18523-AS | CS003315 | AD14135 | 25 |
| AC003406 | AM19907-AS | CS003315 | AD14136 | 25 |
| AC003407 | AM18524-AS | CS003315 | AD14137 | 25 |
| AC003408 | AM18525-AS | CS003315 | AD14138 | 25 |
| AC003409 | AM18526-AS | CS003315 | AD14139 | 25 |
| AC003410 | AM19908-AS | CS003315 | AD14140 | 25 |
| AC003411 | AM19909-AS | CS003315 | AD14141 | 25 |
| AC003412 | AM19910-AS | CS003315 | AD14142 | 25 |
| AC003413 | AM19911-AS | CS003315 | AD14143 | 25 |
| AC003414 | AM19912-AS | CS003315 | AD14144 | 25 |

TABLE 9B
RNAi Agent (targeting NS1) Conjugate Duplex ID Numbers Referencing
Position Targeted on Influenza A viral Genome

| | | | | Targeted |
|---|---|---|---|---|
| | | | | Influenza A |
| | | | | viral genome |
| | | | Duplex ID | Viral Genome |
| Conjugate | | | (Pre- | Position (Of SEQ |
| Duplex ID | AS ID | SS ID | Conjugation) | ID NO: 2) |
| AC002317 | AM15547-AS | CS002930 | AD11159 | 591 |
| AC002318 | AM15729-AS | CS002932 | AD11160 | 814 |
| AC002319 | AM15872-AS | CS002934 | AD11161 | 552 |
| AC002320 | AM15874-AS | CS002936 | AD11162 | 737 |
| AC002322 | AM15877-AS | CS002939 | AD11164 | 511 |
| AC002597 | AM15714-AS | CS003308 | AD11835 | 511 |
| AC002598 | AM15548-AS | CS002930 | AD11836 | 591 |
| AC002760 | AM17578-AS | CS003519 | AD12423 | 83 |
| AC002761 | AM17580-AS | CS003521 | AD12424 | 84 |
| AC002762 | AM17582-AS | CS003523 | AD12425 | 85 |
| AC002763 | AM17584-AS | CS003525 | AD12426 | 541 |
| AC002764 | AM17586-AS | CS003527 | AD12427 | 542 |
| AC002765 | AM17588-AS | CS003529 | AD12428 | 543 |
| AC002766 | AM17590-AS | CS003531 | AD12429 | 545 |
| AC002767 | AM17592-AS | CS003533 | AD12430 | 546 |
| AC002768 | AM17594-AS | CS003535 | AD12431 | 387 |
| AC002769 | AM17596-AS | CS003537 | AD12432 | 491 |
| AC002770 | AM17598-AS | CS003539 | AD12433 | 517 |
| AC002771 | AM17600-AS | CS003541 | AD12434 | 617 |
| AC002905 | AM18492-AS | CS002934 | AD13045 | 552 |
| AC002906 | AM18493-AS | CS002936 | AD13046 | 737 |
| AC002907 | AM15730-AS | CS002932 | AD13047 | 814 |
| AC003112 | AM19062-AS | CS003925 | AD13400 | 201 |
| AC003113 | AM19064-AS | CS003927 | AD13401 | 297 |
| AC003114 | AM19066-AS | CS003929 | AD13402 | 394 |
| AC003115 | AM19068-AS | CS003931 | AD13403 | 416 |
| AC003116 | AM19070-AS | CS003933 | AD13404 | 433 |
| AC003117 | AM19072-AS | CS003935 | AD13405 | 561 |
| AC003118 | AM19074-AS | CS003937 | AD13406 | 564 |
| AC003119 | AM19076-AS | CS003939 | AD13407 | 767 |
| AC003120 | AM19078-AS | CS003941 | AD13408 | 805 |

TABLE 9C
RNAi Agent (targeting PB1) Conjugate Duplex ID Numbers Referencing
Position Targeted on Influenza A viral Genome

| | | | | Targeted |
|---|---|---|---|---|
| | | | | Influenza A |
| | | | | viral genome |
| | | | Duplex ID | Viral Genome |
| Conjugate | | | (Pre- | Position (Of SEQ |
| Duplex ID | AS ID | SS ID | Conjugation) | ID NO: 3) |
| AC002367 | AM16046-AS | CS003004 | AD11292 | 316 |
| AC002368 | AM16048-AS | CS003006 | AD11293 | 787 |
| AC002369 | AM16050-AS | CS003008 | AD11294 | 736 |
| AC002567 | AM16683-AS | CS003274 | AD11736 | 2234 |
| AC002758 | AM17574-AS | CS003515 | AD12421 | 2223 |
| AC002909 | AM18497-AS | CS003681 | AD13049 | 129 |
| AC003123 | AM19084-AS | CS003947 | AD13411 | 1637 |

TABLE 9D
RNAi Agent (targeting PB2) Conjugate Duplex ID Numbers Referencing
Position Targeted on Influenza A viral Genome

| | | | | Targeted |
|---|---|---|---|---|
| | | | | Influenza |
| | | | | A viral |
| | | | | genome |
| | | | | Viral |
| | | | | Genome |
| | | | Duplex ID | Position |
| Conjugate | | | (Pre- | (Of SEQ |
| Duplex ID | AS ID | SS ID | Conjugation) | ID NO: 4) |
| AC002568 | AM16685-AS | CS003276 | AD11737 | 2216 |
| AC002682 | AM17367-AS | CS003407 | AD12249 | 50 |
| AC002683 | AM17369-AS | CS003409 | AD12250 | 363 |
| AC002684 | AM17371-AS | CS003411 | AD12251 | 602 |
| AC002759 | AM17576-AS | CS003517 | AD12422 | 994 |
| AC002910 | AM18499-AS | CS003683 | AD13050 | 782 |
| AC003124 | AM19086-AS | CS003949 | AD13412 | 1959 |

TABLE 9E
RNAi Agent (targeting NP) Conjugate Duplex ID Numbers Referencing
Position Targeted on Influenza A viral Genome

| | | | | Targeted |
|---|---|---|---|---|
| | | | | Influenza |
| | | | | A viral |
| | | | | genome |
| | | | | Viral |
| | | | | Genome |
| | | | Duplex ID | Position |
| Conjugate | | | (Pre- | (Of SEQ |
| Duplex ID | AS ID | SS ID | Conjugation) | ID NO: 5) |
| AC002569 | AM16687-AS | CS003278 | AD11738 | 1428 |
| AC002685 | AM17373-AS | CS003413 | AD12252 | 493 |
| AC002686 | AM17375-AS | CS003415 | AD12253 | 162 |
| AC002756 | AM17570-AS | CS003511 | AD12419 | 579 |
| AC002904 | AM18491-AS | CS003674 | AD13044 | 83 |
| AC003107 | AM19052-AS | CS003915 | AD13395 | 189 |
| AC003108 | AM19054-AS | CS003917 | AD13396 | 427 |
| AC003109 | AM19056-AS | CS003919 | AD13397 | 780 |
| AC003110 | AM19058-AS | CS003921 | AD13398 | 967 |
| AC003111 | AM19060-AS | CS003923 | AD13399 | 1445 |

TABLE 9F
RNAi Agent (targeting PA) Conjugate Duplex ID Numbers Referencing
Position Targeted on Influenza A viral Genome

| | | | | Targeted |
|---|---|---|---|---|
| | | | | Influenza |
| | | | | A viral |
| | | | | genome |
| | | | | Viral |
| | | | | Genome |
| | | | Duplex ID | Position |
| Conjugate | | | (Pre- | (Of SEQ |
| Duplex ID | AS ID | SS ID | Conjugation) | ID NO: 6) |
| AC002565 | AM16679-AS | CS003270 | AD11734 | 7 |
| AC002566 | AM16681-AS | CS003272 | AD11735 | 907 |
| AC002599 | AM16808-AS | CS003311 | AD11837 | 509 |
| AC002600 | AM16810-AS | CS003313 | AD11838 | 1150 |
| AC002757 | AM17572-AS | CS003513 | AD12420 | 2070 |
| AC002908 | AM18495-AS | CS003679 | AD13048 | 140 |
| AC003121 | AM19080-AS | CS003943 | AD13409 | 691 |
| AC003122 | AM19082-AS | CS003945 | AD13410 | 1447 |

TABLE 10A
RNAi Agent (targeting M1) Conjugate ID Numbers With Chemically
Modified Antisense and Sense Strands (including Linkers and Conjugates)

| | | | | SEQ |
|---|---|---|---|---|
| AC ID | Sense Strand (Fully Modified | SEQ | | ID |
| Number | with Conjugated Targeting Ligand) | ID NO: | Antisense Strand (5′ → 3′) | NO: |
| AC002564 | Tri-SM6.1-αvß6-TA14- | 1520 | cPrpusUfsasCfgUfuucgaCfcUfcGfgUfuasg | 1169 |
| | csuaaccgaGfGfUfcgaaacguaas(invAb) | | | |
| AC002601 | Tri-SM6.1-αvß6-TA14- | 1521 | cPrpusAfsusGfaUfagaaaGfaAfcGfuAfcgsu | 1170 |
| | ascguacguUfCfUfuucuaucauas(invAb) | | | |
| AC002754 | Tri-SM6.1-αvß6-TA14- | 1522 | cPrpusAfscsAfaAfaugacCfaUfcGfuCfaasc | 1171 |
| | gsuugacgaUfGfGfucauuuuguas(invAb) | | | |
| AC002755 | Tri-SM6.1-αvß6-TA14- | 1523 | cPrpusGfsasCfaAfaaugaCfcAfuCfgUfcasc | 1172 |
| | gsugacgauGfGfUfcauuuugucas(invAb) | | | |
| AC002863 | Tri-SM6.1-αvß6-TA14- | 1524 | cPrpusUfsAfscguuucgaCfcUfcGfguuasg | 1173 |
| | csuaaccgaGfgUfcGfaaacguaas(invAb) | | | |
| AC002864 | Tri-SM6.1-αvß6-TA14- | 1524 | cPrpusUfsasCfguuucgaCfcUfcGfguuasg | 1174 |
| | csuaaccgaGfgUfcGfaaacguaas(invAb) | | | |
| AC002865 | Tri-SM6.1-αvß6-TA14- | 1524 | cPrpusUfsascGfuuucgaCfcUfcGfguuasg | 1175 |
| | csuaaccgaGfgUfcGfaaacguaas(invAb) | | | |
| AC002866 | Tri-SM6.1-αvß6-TA14- | 1524 | cPrpusUfsascguUfucgaCfcUfcGfguuasg | 1176 |
| | csuaaccgaGfgUfcGfaaacguaas(invAb) | | | |
| AC002867 | Tri-SM6.1-αvß6-TA14- | 1525 | cPrpusUfsAfscguuucgaCfcUfcGfguuasg | 1173 |
| | csuaaccgaGfgUfcgaaacguaas(invAb) | | | |
| AC002868 | Tri-SM6.1-αvß6-TA14- | 1525 | cPrpusUfsasCfguuucgaCfcUfcGfguuasg | 1174 |
| | csuaaccgaGfgUfcgaaacguaas(invAb) | | | |
| AC002869 | Tri-SM6.1-αvß6-TA14- | 1525 | cPrpusUfsascGfuuucgaCfcUfcGfguuasg | 1175 |
| | csuaaccgaGfgUfcgaaacguaas(invAb) | | | |
| AC002870 | Tri-SM6.1-αvß6-TA14- | 1525 | cPrpusUfsascguUfucgaCfcUfcGfguuasg | 1176 |
| | csuaaccgaGfgUfcgaaacguaas(invAb) | | | |
| AC002871 | Tri-SM6.1-αvß6-TA14- | 1525 | cPrpusUfsascguuuCfgaCfcUfcGfguuasg | 1177 |
| | csuaaccgaGfgUfcgaaacguaas(invAb) | | | |
| AC002872 | Tri-SM6.1-αvß6-TA14- | 1520 | cPrpusUfsaCfgUfuucgaCfcUfcGfgUfuasg | 1178 |
| | csuaaccgaGfGfUfcgaaacguaas(invAb) | | | |
| AC002902 | Tri-SM6.1-αvß6-TA14- | 1526 | cPrpusCfsusCfuAfuccauGfuUfgUfuCfggsg | 1179 |
| | csccgaacaAfCfAfuggauagagas(invAb) | | | |
| AC002903 | Tri-SM6.1-αvß6-TA14- | 1527 | cPrpasAfscsUfgCfucuauCfcAfuGfuUfgusc | 1180 |
| | gsacaacauGfGfAfuagaicaguus(invAb) | | | |
| AC002925 | Tri-SM6.1-αvß6-TA14- | 1528 | cPrpusAfsusGfaUfagaaaGfaAfcGfuAfcgsu | 1170 |
| | a_2NscguacguUfCfUfuucuaucauas(invAb) | | | |
| AC002926 | Tri-SM6.1-αvß6-TA14- | 1521 | cPrpusAfsuGfaUfagaaaGfaAfcGfuAfcsgsu | 1181 |
| | ascguacguUfCfUfuucuaucauas(invAb) | | | |
| AC002927 | Tri-SM6.1-αvß6-TA14- | 1521 | cPrpusAfsuGfaUfagaaaGfaAfcGfuAfcgsu | 1182 |
| | ascguacguUfCfUfuucuaucauas(invAb) | | | |
| AC002928 | Tri-SM6.1-αvß6-TA14- | 1529 | cPrpusAfsUfsgauagaaaGfaAfcGfuacgsu | 1183 |
| | ascguacguUfcUfuUfcuaucauas(invAb) | | | |
| AC002929 | Tri-SM6.1-αvß6-TA14- | 1529 | cPrpusAfsusgAfuagaaaGfaAfcGfuacgsu | 1184 |
| | ascguacguUfcUfuUfcuaucauas(invAb) | | | |
| AC002930 | Tri-SM6.1-αvß6-TA14- | 1529 | cPrpusAfsusgauAfgaaaGfaAfcGfuacgsu | 1185 |
| | ascguacguUfcUfuUfcuaucauas(invAb) | | | |
| AC002931 | Tri-SM6.1-αvß6-TA14- | 1529 | cPrpusAfsusgauagAfaaGfaAfcGfuacgsu | 1186 |
| | ascguacguUfcUfuUfcuaucauas(invAb) | | | |
| AC002932 | Tri-SM6.1-αvß6-TA14- | 1530 | cPrpusAfsusgAfuagaaaGfaAfcGfuacgsu | 1184 |
| | ascguacguUfcUfUfucuaucauas(invAb) | | | |
| AC002933 | Tri-SM6.1-αvß6-TA14- | 1530 | cPrpusAfsusgauAfgaaaGfaAfcGfuacgsu | 1185 |
| | ascguacguUfcUfUfucuaucauas(invAb) | | | |
| AC002934 | Tri-SM6.1-αvß6-TA14- | 1530 | cPrpusAfsusgauagAfaaGfaAfcGfuacgsu | 1186 |
| | ascguacguUfcUfUfucuaucauas(invAb) | | | |
| AC003274 | Tri-SM6.1-αvß6-TA14- | 1520 | cPrpusUfsascGfuuucgaCfcUfcGfguuasg | 1175 |
| | csuaaccgaGfGfUfcgaaacguaas(invAb) | | | |
| AC003405 | Tri-SM6.1-αvß6-TA14- | 1521 | cPrpusAfsUfsgauagaaaGfaAfcGfuacgsu | 1183 |
| | ascguacguUfCfUfuucuaucauas(invAb) | | | |
| AC003406 | Tri-SM6.1-αvß6-TA14- | 1521 | cPrpusAfsusGfauagaaaGfaAfcGfuacgsu | 1187 |
| | ascguacguUfCfUfuucuaucauas(invAb) | | | |
| AC003407 | Tri-SM6.1-αvß6-TA14- | 1521 | cPrpusAfsusgAfuagaaaGfaAfcGfuacgsu | 1184 |
| | ascguacguUfCfUfuucuaucauas(invAb) | | | |
| AC003408 | Tri-SM6.1-αvß6-TA14- | 1521 | cPrpusAfsusgauAfgaaaGfaAfcGfuacgsu | 1185 |
| | ascguacguUfCfUfuucuaucauas(invAb) | | | |
| AC003409 | Tri-SM6.1-αvß6-TA14- | 1521 | cPrpusAfsusgauagAfaaGfaAfcGfuacgsu | 1186 |
| | ascguacguUfCfUfuucuaucauas(invAb) | | | |
| AC003410 | Tri-SM6.1-αvß6-TA14- | 1521 | cPrpusAfsUfgauagaaaGfaAfcGfuacgsu | 1188 |
| | ascguacguUfCfUfuucuaucauas(invAb) | | | |
| AC003411 | Tri-SM6.1-αvß6-TA14- | 1521 | cPrpusAfsuGfauagaaaGfaAfcGfuacgsu | 1189 |
| | ascguacguUfCfUfuucuaucauas(invAb) | | | |
| AC003412 | Tri-SM6.1-αvß6-TA14- | 1521 | cPrpusAfsugAfuagaaaGfaAfcGfuacgsu | 1190 |
| | ascguacguUfCfUfuucuaucauas(invAb) | | | |
| AC003413 | Tri-SM6.1-αvß6-TA14- | 1521 | cPrpusAfsugauAfgaaaGfaAfcGfuacgsu | 1191 |
| | ascguacguUfCfUfuucuaucauas(invAb) | | | |
| AC003414 | Tri-SM6.1-αvß6-TA14- | 1521 | cPrpusAfsugauagAfaaGfaAfcGfuacgsu | 1192 |
| | ascguacguUfCfUfuucuaucauas(invAb) | | | |

TABLE 10B
RNAi Agent (targeting NS1) Conjugate ID Numbers With Chemically Modified
Antisense and Sense Strands (including Linkers and Conjugates)

| | Sense Strand (Fully Modified | | | |
|---|---|---|---|---|
| AC ID | with Conjugated Targeting | SEQ | | SEQ |
| Number | Ligand) (5′ → 3′) | ID NO: | Antisense Strand (5′ → 3′) | ID NO: |
| AC002317 | Tri-SM6.1-αvß6-TA14- | 1531 | cPrpusUfscsCfaAfgcgaaUfcUfcUfgUfausc | 1228 |
| | gsauacagaGfAfUfucgcuuigaas(invAb) | | | |
| AC002318 | Tri-SM6.1-αvß6-TA14- | 1532 | cPrpasUfsasAfgCfugaaaCfgAfgAfaAfgcsu | 1242 |
| | asgcuuucuCfGfUfuucagcuuaus(invAb) | | | |
| AC002319 | Tri-SM6.1-αvß6-TA14- | 1533 | cPrpusUfsgsUfuAfccauuCfcAfuUfcAfagsc | 1244 |
| | gscuugaauGfGfAfaugguaacaas(invAb) | | | |
| AC002320 | Tri-SM6.1-αvß6-TA14- | 1534 | cPrpusUfscsGfaAfacuauUfcUfcUfgUfcgsc | 1245 |
| | gscgacagaGfAfAfuaguuucgaas(invAb) | | | |
| AC002322 | Tri-SM6.1-αvß6-TA14- | 1535 | cPrpusGfscsAfuUfuuugaCfaUfcCfuCfausc | 1246 |
| | gsaugaggaUfGfUfcaaaaaugcas(invAb) | | | |
| AC002597 | Tri-SM6.1-αvß6-TA14- | 1536 | cPrpusGfscsauuUfuugaCfaUfcCfucausc | 1234 |
| | gsaugaggaUfgUfcAfaaaaugcas(invAb) | | | |
| AC002598 | Tri-SM6.1-αvß6-TA14- | 1531 | cPrpusUfscCfaAfgcgaaUfcUfcUfgUfasusc | 1229 |
| | gsauacagaGfAfUfucgcuuigaas(invAb) | | | |
| AC002760 | Tri-SM6.1-αvß6-TA14- | 1537 | cPrpusAfsusCfaAfggaauGfgGfgCfaUfcasc | 1247 |
| | gsugaugccCfCfAfuuccuugauas(invAb) | | | |
| AC002761 | Tri-SM6.1-αvß6-TA14- | 1538 | cPrpusGfsasUfcAfaggaaUfgGfgGfcAfucsa | 1248 |
| | usgaugcccCfAfUfuccuugaucas(invAb) | | | |
| AC002762 | Tri-SM6.1-αvß6-TA14- | 1539 | cPrpusCfsgsAfuCfaaggaAfuGfgGfgCfausc | 1249 |
| | gsaugccccAfUfUfccuuiaucgas(invAb) | | | |
| AC002763 | Tri-SM6.1-αvß6-TA14- | 1540 | cPrpusCfsasUfuCfaagucCfuCfcGfaUfgasg | 1250 |
| | csucaucggAfGfGfacuugaaugas(invAb) | | | |
| AC002764 | Tri-SM6.1-αvß6-TA14- | 1541 | cPrpusCfscsAfuUfcaaguCfcUfcCfgAfugsa | 1251 |
| | uscaucggaGfGfAfcuugaauigas(invAb) | | | |
| AC002765 | Tri-SM6.1-αvß6-TA14- | 1542 | cPrpusUfscsCfaUfucaagUfcCfuCfcGfausg | 1252 |
| | csaucggagGfAfCfuugaauggaas(invAb) | | | |
| AC002766 | Tri-SM6.1-αvß6-TA14- | 1543 | cPrpusAfsusUfcCfauucaAfgUfcCfuCfcgsa | 1253 |
| | uscggaggaCfUfUfgaauggaauas(invAb) | | | |
| AC002767 | Tri-SM6.1-αvß6-TA14- | 1544 | cPrpusCfsasUfuCfcauucAfaGfuCfcUfccsg | 1254 |
| | csggaggacUfUfGfaaugiaaugas(invAb) | | | |
| AC002768 | Tri-SM6.1-αvß6-TA14- | 1545 | cPrpasCfsasCfuGfaaguuCfgCfuUfuCfagsu | 1255 |
| | ascugaaagCfGfAfacuucaiugus(invAb) | | | |
| AC002769 | Tri-SM6.1-αvß6-TA14- | 1546 | cPrpasAfsgsUfaUfguccuGfgAfaGfaGfaasg | 1256 |
| | csuucucuuCfCfAfggacauacuus(invAb) | | | |
| AC002770 | Tri-SM6.1-αvß6-TA14- | 1547 | cPrpusCfscsAfaCfugcauUfuUfuGfaCfausc | 1257 |
| | gsaugucaaAfAfAfugcaiuuggas(invAb) | | | |
| AC002771 | Tri-SM6.1-αvß6-TA14- | 1548 | cPrpasAfsgsGfuCfucccaUfuCfuCfaUfcasc | 1258 |
| | gsugaugagAfAfUfgggaiaccuus(invAb) | | | |
| AC002905 | Tri-SM6.1-αvß6-TA14- | 1533 | cPrpusUfsgsuuaCfcauuCfcAfuUfcaagsc | 1259 |
| | gscuugaauGfGfAfaugguaacaas(invAb) | | | |
| AC002906 | Tri-SM6.1-αvß6-TA14- | 1534 | cPrpusUfscsgaaAfcuauUfcUfcUfgucgsc | 1260 |
| | gscgacagaGfAfAfuaguuucgaas(invAb) | | | |
| AC002907 | Tri-SM6.1-αvß6-TA14- | 1532 | cPrpasUfsaAfgCfugaaaCfgAfgAfaAfgscsu | 1243 |
| | asgcuuucuCfGfUfuucagcuuaus(invAb) | | | |
| AC003112 | Tri-SM6.1-αvß6-TA14- | 1549 | cPrpusUfsgsGfaUfuccucUfuUfcAfaGfausc | 1261 |
| | gsaucuugaAfAfGfaggaauccaas(invAb) | | | |
| AC003113 | Tri-SM6.1-αvß6-TA14- | 1550 | cPrpasUfsgsAfgCfaugaaCfcAfgUfcUfcgsu | 1262 |
| | ascgagacuGfGfUfucauicucaus(invAb) | | | |
| AC003114 | Tri-SM6.1-αvß6-TA14- | 1551 | cPrpasAfsasGfaUfuacacUfgAfaGfuUfcgsc | 1263 |
| | gscgaacuuCfAfGfuguaaucuuus(invAb) | | | |
| AC003115 | Tri-SM6.1-αvß6-TA14- | 1552 | cPrpusUfsasUfcAfaggucUfcUfaAfuCfggsu | 1264 |
| | asccgauuaGfAfGfaccuugauaas(invAb) | | | |
| AC003116 | Tri-SM6.1-αvß6-TA14- | 1553 | cPrpasGfsusGfaAfagcccUfuAfgUfaGfuasc | 1265 |
| | gsuacuacuAfAfGfggcuuucacus(invAb) | | | |
| AC003117 | Tri-SM6.1-αvß6-TA14- | 1554 | cPrpasCfsusCfgAfaccguGfuUfaCfcAfuusc | 1266 |
| | gsaaugguaAfCfAfcgguuciagus(invAb) | | | |
| AC003118 | Tri-SM6.1-αvß6-TA14- | 1555 | cPrpusAfsgsAfcUfcgaacCfgUfgUfuAfccsa | 1267 |
| | usgguaacaCfGfGfuucgaiucuas(invAb) | | | |
| AC003119 | Tri-SM6.1-αvß6-TA14- | 1556 | cPrpusAfsgsUfuGfuaaggCfuUfgCfaUfaasc | 1268 |
| | gsuuaugcaAfGfCfcuuacaacuas(invAb) | | | |
| AC003120 | Tri-SM6.1-αvß6-TA14- | 1557 | cPrpasAfscsGfaGfaaagcUfcUfuAfuCfucsc | 1269 |
| | gsgagauaaGfAfGfcuuucuciuus(invAb) | | | |

TABLE 10C
RNAi Agent (targeting PB1) Conjugate ID Numbers With Chemically Modified Antisense
and Sense Strands (including Linkers and Conjugates)

| | Sense Strand (Fully Modified | | | |
|---|---|---|---|---|
| AC ID | with Conjugated Targeting | SEQ | | SEQ |
| Number | Ligand) (5′ → 3′) | ID NO: | Antisense Strand (5′ → 3′) | ID NO: |
| AC002367 | Tri-SM6.1-αvß6-TA14- | 1558 | cPrpusUfscsCfaUfuguuuCfaAfgGfcAfugsa | 1295 |
| | uscaugccuUfGfAfaacaauggaas(invAb) | | | |
| AC002368 | Tri-SM6.1-αvß6-TA14- | 1559 | cPrpasGfsasCfuGfuucaaGfcUfuUfuCfgcsa | 1296 |
| | usgcgaaaaGfCfUfugaacaiucus(invAb) | | | |
| AC002369 | Tri-SM6.1-αvß6-TA14- | 1560 | cPrpusAfscsGfaAfaccucUfaAfuCfuGfcasc | 1297 |
| | gsugcagauUfAfGfagguuucguas(invAb) | | | |
| AC002567 | Tri-SM6.1-αvß6-TA14- | 1561 | cPrpusUfsusCfaAfuggugGfaAfcAfgAfucsu | 1298 |
| | asgaucuguUfCfCfaccauugaaas(invAb) | | | |
| AC002758 | Tri-SM6.1-αvß6-TA14- | 1562 | cPrpusAfsasCfaGfaucuuCfaUfgAfuCfucsc | 1299 |
| | gsgagaucaUfGfAfagaucuguuas(invAb) | | | |
| AC002909 | Tri-SM6.1-αvß6-TA14- | 1563 | cPrpusAfsgsUfaUfuggugUfgUfuCfuGfuusc | 1300 |
| | gsaacagaaCfAfCfaccaauacuas(invAb) | | | |
| AC003123 | Tri-SM6.1-αvß6-TA14- | 1564 | cPrpusGfsasUfgAfacaauUfgAfaGfaGfccsa | 1301 |
| | usggcucuuCfAfAfuuguucaucas(invAb) | | | |

TABLE 10D
RNAi Agent (targeting PB2) Conjugate ID Numbers With Chemically Modified Antisense
and Sense Strands (including Linkers and Conjugates)

| | Sense Strand (Fully Modified | | | |
|---|---|---|---|---|
| AC ID | with Conjugated Targeting | SEQ | | SEQ |
| Number | Ligand) (5′ → 3′) | ID NO: | Antisense Strand (5′ → 3′) | ID NO: |
| AC002568 | Tri-SM6.1-αvß6-TA14- | 1565 | cPrpusAfsgsUfaAfguaugCfuAfgAfgUfccsc | 1314 |
| | gsggacucuAfGfCfauacuuacuas(invAb) | | | |
| AC002682 | Tri-SM6.1-αvß6-TA14- | 1566 | cPrpusGfsgsUfcUfuagugAfgUfaUfcUfcgsc | 1315 |
| | gscgagauaCfUfCfacuaaiaccas(invAb) | | | |
| AC002683 | Tri-SM6.1-αvß6-TA14- | 1567 | cPrpusCfsasUfgUfuucaaCfcUfuUfcGfacsc | 1316 |
| | gsgucgaaaGfGfUfugaaacaugas(invAb) | | | |
| AC002684 | Tri-SM6.1-αvß6-TA14- | 1568 | cPrpusUfsasGfcAfuguacGfcCfaCfcAfucsa | 1317 |
| | usgauggugGfCfGfuacaugcuaas(invAb) | | | |
| AC002759 | Tri-SM6.1-αvß6-TA14- | 1569 | cPrpusAfscsUfgAfugaucCfgCfuUfgUfccsu | 1318 |
| | asggacaagCfGfGfaucaucaguas(invAb) | | | |
| AC002910 | Tri-SM6.1-αvß6-TA14- | 1570 | cPrpusUfsasCfuAfuguuuCfuAfgCfaGfcgsa | 1319 |
| | uscgcugcuAfGfAfaacauaguaas(invAb) | | | |
| AC003124 | Tri-SM6.1-αvß6-TA14- | 1571 | cPrpusUfsgsUfuGfuaauuGfaAfuAfcUfggsa | 1320 |
| | usccaguauUfCfAfauuacaacaas(invAb) | | | |

TABLE 10E
RNAi Agent (targeting NP) Conjugate ID Numbers With Chemically Modified Antisense
and Sense Strands (including Linkers and Conjugates)

| | Sense Strand (Fully Modified | | | |
|---|---|---|---|---|
| ACID | with Conjugated Targeting | SEQ | | SEQ |
| Number | Ligand) (5′ → 3′) | ID NO: | Antisense Strand (5′ → 3′) | ID NO: |
| AC002569 | Tri-SM6.1-αvß6-TA14- | 1572 | cPrpusUfsasCfuCfaugucAfaAfgGfaAfggsc | 1337 |
| | gsccuuccuUfUfGfacaugaguaas(invAb) | | | |
| AC002685 | Tri-SM6.1-αvß6-TA14- | 1573 | cPrpusGfsusUfgAfaccuuGfcAfuUfaGfagsc | 1338 |
| | gscucuaauGfCfAfagguucaacas(invAb) | | | |
| AC002686 | Tri-SM6.1-αvß6-TA14- | 1574 | cPrpasUfsgsCfuAfuucugGfaUfuAfgUfcgsu | 1339 |
| | ascgacuaaUfCfCfagaauagcaus(invAb) | | | |
| AC002756 | Tri-SM6.1-αvß6-TA14- | 1575 | cPrpusCfsasCfgUfuugauCfaUfuCfuGfausc | 1340 |
| | gsaucagaaUfGfAfucaaaciugas(invAb) | | | |
| AC002904 | Tri-SM6.1-αvß6-TA14- | 1576 | cPrpusAfscsCfaAfucauuCfuUfcCfgAfcasg | 1341 |
| | csugucggaAfGfAfaugauugguas(invAb) | | | |
| AC003107 | Tri-SM6.1-αvß6-TA14- | 1577 | cPrpusCfsasGfaAfagcacCfaUfcCfuCfucsu | 1342 |
| | asgagaggaUfGfGfugcuuucugas(invAb) | | | |
| AC003108 | Tri-SM6.1-αvß6-TA14- | 1578 | cPrpusUfsgsAfuAfuguggCfaUfcAfuUfcasg | 1343 |
| | csugaaugaUfGfCfcacauaucaas(invAb) | | | |
| AC003109 | Tri-SM6.1-αvß6-TA14- | 1579 | cPrpusUfscsAfgAfaugagUfgCfuGfaCfcgsu | 1344 |
| | ascggucagCfAfCfucauucugaas(invAb) | | | |
| AC003110 | Tri-SM6.1-αvß6-TA14- | 1580 | cPrpusAfscsCfaAfuugacUfcUfuGfuGfagsc | 1345 |
| | gscucacaaGfAfGfucaauugguas(invAb) | | | |
| AC003111 | Tri-SM6.1-αvß6-TA14- | 1581 | cPrpasGfsasAfaUfaagacCfcUfuCfaUfuasc | 1346 |
| | gsuaaugaaGfGfGfucuuauuucus(invAb) | | | |

TABLE 10F
RNAi Agent (targeting PA) Conjugate ID Numbers With Chemically Modified Antisense
and Sense Strands (including Linkers and Conjugates)

| | Sense Strand (Fully Modified with | SEQ | | SEQ |
|---|---|---|---|---|
| ac id | Conjugating Targeting | ID | | ID |
| Number | Ligand) (5′ → 3′) | NO: | Antisense Strand (5′ → 3′) | NO: |
| AC002565 | Tri-SM6.1-αvß6-TA14- | 1582 | cPrpusAfsasGfcAfuugucGfcAfcAfaAfgusc | 1360 |
| | gsacuuuguGfCfGfacaaugcuuas(invAb) | | | |
| AC002566 | Tri-SM6.1-αvß6-TA14- | 1583 | cPrpusUfsusGfaUfugcauCfaUfaUfaGfugsg | 1361 |
| | cscacuauaUfGfAfugcaaucaaas(invAb) | | | |
| AC002599 | Tri-SM6.1-αvß6-TA14- | 1584 | cPrpusGfsasAfaAfgccuaGfuUfuUfgAfuusc | 1362 |
| | gsa_2NaucaaaAfCfUfaggcuuuucas(invAb) | | | |
| AC002600 | Tri-SM6.1-αvß6-TA14- | 1585 | cPrpasAfsgsGfuCfuccaaCfaUfcUfuUfgcsa | 1363 |
| | usgcaaagaUfGfUfuggaiaccuus(invAb) | | | |
| AC002757 | Tri-SM6.1-αvß6-TA14- | 1586 | cPrpusCfsasUfuAfaucagGfcAfcUfcCfucsg | 1364 |
| | csgaggaguGfCfCfugauuaaugas(invAb) | | | |
| AC002908 | Tri-SM6.1-αvß6-TA14- | 1587 | cPrpusGfsasAfaUfggaaaUfcCfgAfaUfacsc | 1365 |
| | gsguauucgGfAfUfuuccauuucas(invAb) | | | |
| AC003121 | Tri-SM6.1-αvß6-TA14- | 1588 | cPrpusUfscsGfaAfuccauCfuAfcAfuAfggsc | 1366 |
| | gsccuauguAfGfAfuggauucgaas(invAb) | | | |
| AC003122 | Tri-SM6.1-αvß6-TA14- | 1589 | cPrpasCfsasUfuUfgcuuaUfcAfuUfgGfgasu | 1367 |
| | asucccaauGfa_2NUfaagcaaaugus(invAb) | | | |

[0202] In some embodiments, an IAV RNAi agent is prepared or provided as a salt, mixed salt, or a free-acid. In some embodiments, an IAV RNAi agent is prepared or provided as a pharmaceutically acceptable salt. In some embodiments, an IAV RNAi agent is prepared or provided as a pharmaceutically acceptable sodium or potassium salt. The RNAi agents described herein, upon delivery to a cell expressing an influenza A viral genome viral genome, inhibit or knockdown expression of one or more influenza A viral genomes in vivo and/or in vitro.

### Targeting Groups, Linking Groups, Pharmacokinetic/Pharmacodynamic (PK/PD) Modulators, and Delivery Vehicles

[0203] In some embodiments, an IAV RNAi agent contains or is conjugated to one or more non-nucleotide groups including, but not limited to, a targeting group, a linking group, a pharmacokinetic/pharmacodynamic (PK/PD) modulator, a delivery polymer, or a delivery vehicle. The non-nucleotide group can enhance targeting, delivery, or attachment of the RNAi agent. The non-nucleotide group can be covalently linked to the 3′ and/or 5′ end of either the sense strand and/or the antisense strand. In some embodiments, an IAV RNAi agent contains a non-nucleotide group linked to the 3′ and/or 5′ end of the sense strand. In some embodiments, a non-nucleotide group is linked to the 5′ end of an IAV RNAi agent sense strand. A non-nucleotide group can be linked directly or indirectly to the RNAi agent via a linker/linking group. In some embodiments, a non-nucleotide group is linked to the RNAi agent via a labile, cleavable, or reversible bond or linker.

[0204] In some embodiments, a non-nucleotide group enhances the pharmacokinetic or biodistribution properties of an RNAi agent or conjugate to which it is attached to improve cell- or tissue-specific distribution and cell-specific uptake of the conjugate. In some embodiments, a non-nucleotide group enhances endocytosis of the RNAi agent.

[0205] Targeting groups or targeting moieties enhance the pharmacokinetic or biodistribution properties of a conjugate or RNAi agent to which they are attached to improve cell-specific (including, in some cases, organ specific) distribution and cell-specific (or organ specific) uptake of the conjugate or RNAi agent. A targeting group can be monovalent, divalent, trivalent, tetravalent, or have higher valency for the target to which it is directed. Representative targeting groups include, without limitation, compounds with affinity to cell surface molecule, cell receptor ligands, hapten, antibodies, monoclonal antibodies, antibody fragments, and antibody mimics with affinity to cell surface molecules. In some embodiments, a targeting group is linked to an RNAi agent using a linker, such as a PEG linker or one, two, or three abasic and/or ribitol (abasic ribose) residues, which in some instances can serve as linkers.

[0206] A targeting group, with or without a linker, can be attached to the 5′ or 3′ end of any of the sense and/or antisense strands disclosed in Tables 2A, 2B, 2C, 2D, 2E, 2F, 3A, 3B, 3C, 3D, 3E, 3F, 4A, 4B, 4C, 4D, 4E, 4F, 5A, 5B, 5C, 5D, 5E, 5F, 6A, 6B, 6C, 6D, 6E, 6F, 10A, 10B, 10C, 10D, 10E, and 10F. A linker, with or without a targeting group, can be attached to the 5′ or 3′ end of any of the sense and/or antisense strands disclosed in Tables 2A, 2B, 2C, 2D, 2E, 2F, 3A, 3B, 3C, 3D, 3E, 3F, 4A, 4B, 4C, 4D, 4E, 4F, 5A, 5B, 5C, 5D, 5E, 5F, 6A, 6B, 6C, 6D, 6E, 6F, 10A, 10B, 10C, 10D, 10E, and 10F.

[0207] The IAV RNAi agents described herein can be synthesized having a reactive group, such as an amino group (also referred to herein as an amine), at the 5′-terminus and/or the 3′-terminus. The reactive group can be used subsequently to attach a targeting moiety using methods typical in the art.

[0208] For example, in some embodiments, the IAV RNAi agents disclosed herein are synthesized having an NH₂-C₆ group at the 5′-terminus of the sense strand of the RNAi agent. The terminal amino group subsequently can be reacted to form a conjugate with, for example, a group that includes an αvβ6 integrin targeting ligand. In some embodiments, the IAV RNAi agents disclosed herein are synthesized having one or more alkyne groups at the 5′-terminus of the sense strand of the RNAi agent. The terminal alkyne group(s) can subsequently be reacted to form a conjugate with, for example, a group that includes an αvβ6 integrin targeting ligand.

[0209] In some embodiments, a targeting group comprises an integrin targeting ligand. In some embodiments, an integrin targeting ligand is an αvβ6 integrin targeting ligand. The use of an αvβ6 integrin targeting ligand facilitates cell-specific targeting to cells having αvβ6 on its respective surface, and binding of the integrin targeting ligand can facilitate entry of the therapeutic agent, such as an RNAi agent, to which it is linked, into cells such as epithelial cells, including pulmonary epithelial cells and renal epithelial cells. Integrin targeting ligands can be monomeric or monovalent (e.g., having a single integrin targeting moiety) or multimeric or multivalent (e.g., having multiple integrin targeting moieties). The targeting group can be attached to the 3′ and/or 5′ end of the RNAi oligonucleotide using methods known in the art. The preparation of targeting groups, such as αvβ6 integrin targeting ligands, is described, for example, in International Patent Application Publication No. WO 2018/085415 and in International Patent Application Publication No. WO 2019/089765, the contents of each of which are incorporated herein in its entirety.

[0210] In some embodiments, targeting groups are linked to the IAV RNAi agents without the use of an additional linker. In some embodiments, the targeting group is designed having a linker readily present to facilitate the linkage to an IAV RNAi agent. In some embodiments, when two or more RNAi agents are included in a composition, the two or more RNAi agents can be linked to their respective targeting groups using the same linkers. In some embodiments, when two or more RNAi agents are included in a composition, the two or more RNAi agents are linked to their respective targeting groups using different linkers.

[0211] In some embodiments, a linking group is conjugated to the RNAi agent. The linking group facilitates covalent linkage of the agent to a targeting group, pharmacokinetic modulator, delivery polymer, or delivery vehicle. The linking group can be linked to the 3′ and/or the 5′ end of the RNAi agent sense strand or antisense strand. In some embodiments, the linking group is linked to the RNAi agent sense strand. In some embodiments, the linking group is conjugated to the 5′ or 3′ end of an RNAi agent sense strand. In some embodiments, a linking group is conjugated to the 5′ end of an RNAi agent sense strand. Examples of linking groups, include but are not limited to: C6-SS-C6, 6-SS-6, reactive groups such a primary amines (e.g., NH2-C6) and alkynes, alkyl groups, abasic residues/nucleotides, amino acids, tri-alkyne functionalized groups, ribitol, and/or PEG groups. Examples of certain linking groups are provided in Table 11.

[0212] A linker or linking group is a connection between two atoms that links one chemical group (such as an RNAi agent) or segment of interest to another chemical group (such as a targeting group, pharmacokinetic modulator, or delivery polymer) or segment of interest via one or more covalent bonds. A labile linkage contains a labile bond. A linkage can optionally include a spacer that increases the distance between the two joined atoms. A spacer may further add flexibility and/or length to the linkage. Spacers include, but are not limited to, alkyl groups, alkenyl groups, alkynyl groups, aryl groups, aralkyl groups, aralkenyl groups, and aralkynyl groups; each of which can contain one or more heteroatoms, heterocycles, amino acids, nucleotides, and saccharides. Spacer groups are well known in the art and the preceding list is not meant to limit the scope of the description. In some embodiments, an IAV RNAi agent is conjugated to a polyethylene glycol (PEG) moiety, or to a hydrophobic group having 12 or more carbon atoms, such as a cholesterol or palmitoyl group.

[0213] In some embodiments, an IAV RNAi agent is linked to one or more pharmacokinetic/pharmacodynamic (PK/PD) modulators. PK/PD modulators can increase circulation time of the conjugated drug and/or increase the activity of the RNAi agent through improved cell receptor binding, improved cellular uptake, and/or other means. Various PK/PD modulators suitable for use with RNAi agents are known in the art. In some embodiments, the PK/PD modulatory can be cholesterol or cholesteryl derivatives, or in some circumstances a PK/PD modulator can be comprised of alkyl groups, alkenyl groups, alkynyl groups, aryl groups, aralkyl groups, aralkenyl groups, or aralkynyl groups, each of which may be linear, branched, cyclic, and/or substituted or unsubstituted. In some embodiments, the location of attachment for these moieties is at the 5′ or 3′ end of the sense strand, at the 2′ position of the ribose ring of any given nucleotide of the sense strand, and/or attached to the phosphate or phosphorothioate backbone at any position of the sense strand.

[0214] Any of the IAV RNAi agent nucleotide sequences listed in Tables 2A, 2B, 2C, 2D, 2E, 2F, 3A, 3B, 3C, 3D, 3E, 3F, 4A, 4B, 4C, 4D, 4E, 4F, 5A, 5B, 5C, 5D, 5E, 5F, 6A, 6B, 6C, 6D, 6E, 6F, 10A, 10B, 10C, 10D, 10E, and 10F, whether modified or unmodified, can contain 3′ and/or 5′ targeting group(s), linking group(s), and/or PK/PD modulator(s). Any of the IAV RNAi agent sequences listed in Tables 3A, 3B, 3C, 3D, 3E, 3F, 4A, 4B, 4C, 4D, 4E, 4F, 5A, 5B, 5C, 5D, 5E, 5F, 6A, 6B, 6C, 6D, 6E, 6F, 10A, 10B, 10C, 10D, 10E, and 10F, or are otherwise described herein, which contain a 3′ or 5′ targeting group, linking group, and/or PK/PD modulator can alternatively contain no 3′ or 5′ targeting group, linking group, or PK/PD modulator, or can contain a different 3′ or 5′ targeting group, linking group, or pharmacokinetic modulator including, but not limited to, those depicted in Table 11. Any of the IAV RNAi agent duplexes listed in Tables 7A-1, 7A-2, 7A-3, 7A-4, 7A-5, 7A-6, 7B-1, 7B-2, 7B-3, 7B-4, 7B-5, 7B-6, 8A, 8B, 8C, 8D, 8E, 8F, 9A, 9B, 9C, 9D, 9E, 9F, 10A, 10B, 10C, 10D, 10E, and 10F, whether modified or unmodified, can further comprise a targeting group or linking group, including, but not limited to, those depicted in Table 11, and the targeting group or linking group can be attached to the 3′ or 5′ terminus of either the sense strand or the antisense strand of the IAV RNAi agent duplex.

[0215] Examples of certain modified nucleotides, capping moieties, and linking groups are provided in Table 11.

TABLE 11
Structures Representing Various Modified Nucleotides, Capping Moieties, and
Linking Groups (wherein [symbol]
indicates the point of connection)

[chemical structure]

[chemical structure]

[chemical structure]

[chemical structure]

[chemical structure]

[chemical structure]

[chemical structure]

[chemical structure]

[chemical structure]

[chemical structure]

[chemical structure]

[chemical structure]

[chemical structure]

[chemical structure]

When positioned internally:
linkage towards 5′ end

[chemical structure]

linkage towards 3′ end
(invAb)
When positioned internally:
linkage towards 5′ end

[chemical structure]

linkage towards 3′ end
(invAb)s
When positioned at the 3′ terminal end:
linkage towards 5′ end

[chemical structure]

When positioned at the 3′ terminal end:
linkage towards 5′ end

[chemical structure]

When positioned internally:

| | |
|---|---|
| linkage towards 5′ end | linkage towards 3′ end |

[chemical structure]

When positioned at the 3′ terminal end:
linkage towards 5′ end

[chemical structure]

When positioned internally:

| | |
|---|---|
| linkage towards 5′ end | linkage towards 3′ end |

[chemical structure]

[chemical structure]

[chemical structure]

[chemical structure]

[chemical structure]

[chemical structure]

[chemical structure]

[chemical structure]

[chemical structure]

[chemical structure]

[chemical structure]

[chemical structure]

[chemical structure]

[chemical structure]

[0216] Alternatively, other linking groups known in the art may be used. In many instances, linking groups can be commercially acquired or alternatively, are incorporated into commercially available nucleotide phosphoramidites. (See, e.g., International Patent Application Publication No. WO 2019/161213, which is incorporated herein by reference in its entirety).

[0217] In some embodiments, an IAV RNAi agent is delivered without being conjugated to a targeting ligand or pharmacokinetic/pharmacodynamic (PK/PD) modulator (referred to as being “naked” or a “naked RNAi agent”).

[0218] In some embodiments, an IAV RNAi agent is conjugated to a targeting group, a linking group, a PK modulator, and/or another non-nucleotide group to facilitate delivery of the IAV RNAi agent to the cell or tissue of choice, for example, to an epithelial cell in vivo. In some embodiments, an IAV RNAi agent is conjugated to a targeting group wherein the targeting group includes an integrin targeting ligand. In some embodiments, the integrin targeting ligand is an αvβ6 integrin targeting ligand. In some embodiments, a targeting group includes one or more αvβ6 integrin targeting ligands.

[0219] In some embodiments, a delivery vehicle may be used to deliver an RNAi agent to a cell or tissue. A delivery vehicle is a compound that improves delivery of the RNAi agent to a cell or tissue. A delivery vehicle can include, or consist of, but is not limited to: a polymer, such as an amphipathic polymer, a membrane active polymer, a peptide, a melittin peptide, a melittin-like peptide (MLP), a lipid, a reversibly modified polymer or peptide, or a reversibly modified membrane active polyamine.

[0220] In some embodiments, the RNAi agents can be combined with lipids, nanoparticles, polymers, liposomes, micelles, DPCs or other delivery systems available in the art for nucleic acid delivery. The RNAi agents can also be chemically conjugated to targeting groups, lipids (including, but not limited to cholesteryl and cholesteryl derivatives), encapsulating in nanoparticles, liposomes, micelles, conjugating to polymers or DPCs (see, for example WO 2000/053722, WO 2008/022309, WO 2011/104169, and WO 2012/083185, WO 2013/032829, WO 2013/158141, each of which is incorporated herein by reference), by iontophoresis, or by incorporation into other delivery vehicles or systems available in the art such as hydrogels, cyclodextrins, biodegradable nanocapsules, bioadhesive microspheres, or proteinaceous vectors. In some embodiments the RNAi agents can be conjugated to antibodies having affinity for pulmonary epithelial cells. In some embodiments, the RNAi agents can be linked to targeting ligands that have affinity for pulmonary epithelial cells or receptors present on pulmonary epithelial cells.

### Pharmaceutical Compositions and Formulations

[0221] The IAV RNAi agents disclosed herein can be prepared as pharmaceutical compositions or formulations (also referred to herein as “medicaments”). In some embodiments, pharmaceutical compositions include at least one IAV RNAi agent. These pharmaceutical compositions are particularly useful in the inhibition of the expression of influenza A viral genome RNA or an influenza RNA transcript in a target cell, a group of cells, a tissue, or an organism. The pharmaceutical compositions can be used to treat a subject having a disease, disorder, or condition that would benefit from reduction in the level of the target influenza virus mRNA or RNA transcript, or inhibition in expression of the target viral genome. The pharmaceutical compositions can be used to treat a subject at risk of developing a disease or disorder that would benefit from reduction of the level of the target RNA or the target viral genome. In one embodiment, the method includes administering an IAV RNAi agent linked to a targeting ligand as described herein, to a subject to be treated. In some embodiments, one or more pharmaceutically acceptable excipients (including vehicles, carriers, diluents, and/or delivery polymers) are added to the pharmaceutical compositions that include an IAV RNAi agent, thereby forming a pharmaceutical formulation or medicament suitable for in vivo delivery to a subject, including a human.

[0222] The pharmaceutical compositions that include an IAV RNAi agent and methods disclosed herein decrease the level of the target influenza A viral RNA in a cell, group of cells, group of cells, tissue, organ, or subject, including by administering to the subject a therapeutically effective amount of a herein described IAV RNAi agent, thereby inhibiting the expression of Influenza A viral genome RNA or another influenza RNA or RNA transcript in the subject. In some embodiments, the subject has been previously identified or diagnosed as having a disease or disorder related to influenza infection, including influenza A viral genome infection, such as of symptoms and diseases associated influenza A viral infection, including but not limited to infection of the nose, throat, lungs, and other parts of the respiratory system. In some embodiments, the subject has been previously diagnosed with having pulmonary inflammation or other pulmonary symptoms consistent with an influenza infection.

[0223] Embodiments of the present disclosure include pharmaceutical compositions for delivering an IAV RNAi agent to a pulmonary epithelial cell in vivo. Such pharmaceutical compositions can include, for example, an IAV RNAi agent conjugated to a targeting group that comprises an integrin targeting ligand. In some embodiments, the integrin targeting ligand is comprised of an αvβ6 integrin ligand.

[0224] In some embodiments, the described pharmaceutical compositions including an IAV RNAi agent are used for treating or managing clinical presentations in a subject that would benefit from the inhibition of expression of influenza A viral genome. In some embodiments, a therapeutically or prophylactically effective amount of one or more of pharmaceutical compositions is administered to a subject in need of such treatment. In some embodiments, administration of any of the disclosed IAV RNAi agents can be used to decrease the number, severity, and/or frequency of symptoms of a disease in a subject.

[0225] In some embodiments, the described IAV RNAi agents are optionally combined with one or more additional (i.e., second, third, etc.) therapeutics. A second therapeutic can be another IAV RNAi agent (e.g., an IAV RNAi agent that targets a different sequence within an influenza A viral genome viral genome). In some embodiments, a second therapeutic can be an RNAi agent that targets the influenza A viral genome or the genome of a different influenza virus. An additional therapeutic can also be a small molecule drug, antibody, antibody fragment, peptide, vaccine, and/or aptamer. The IAV RNAi agents, with or without the one or more additional therapeutics, can be combined with one or more excipients to form pharmaceutical compositions.

[0226] The described pharmaceutical compositions that include an IAV RNAi agent can be used to treat at least one symptom in a subject having a disease or disorder caused by an influenza virus infection. In some embodiments, the subject is administered a therapeutically effective amount of one or more pharmaceutical compositions that include an IAV RNAi agent thereby treating the symptom. In other embodiments, the subject is administered a prophylactically effective amount of one or more IAV RNAi agents, thereby preventing or inhibiting the at least one symptom by preventing the influenza virus from establishing itself and replicating in the cells of the organism.

[0227] The described pharmaceutical compositions that include an IAV RNAi agent can be used to treat at least one symptom in a subject having a disease or disorder caused by an influenza virus infection (including potentially preventative or prophylactic treatment). The influenza virus infection can be caused by influenza A subtypes including but not limited to, H1N1, H2N2, H3N2, H5N1, H7N9, and H10N8.

[0228] In some embodiments, one or more of the described IAV RNAi agents are administered to a mammal in a pharmaceutically acceptable carrier or diluent. In some embodiments, the mammal is a human.

[0229] The route of administration is the path by which an IAV RNAi agent is brought into contact with the body. In general, methods of administering drugs, oligonucleotides, and nucleic acids, for treatment of a mammal are well known in the art and can be applied to administration of the compositions described herein. The IAV RNAi agents disclosed herein can be administered via any suitable route in a preparation appropriately tailored to the particular route. Thus, in some embodiments, the herein described pharmaceutical compositions are administered via inhalation, intranasal administration, intratracheal administration, or oropharyngeal aspiration administration. In some embodiments, the pharmaceutical compositions can be administered by injection, for example, intravenously, intramuscularly, intracutaneously, subcutaneously, intraarticularly, intraocularly, or intraperitoneally, or topically.

[0230] The pharmaceutical compositions including an IAV RNAi agent described herein can be delivered to a cell, group of cells, tissue, or subject using oligonucleotide delivery technologies known in the art. In general, any suitable method recognized in the art for delivering a nucleic acid molecule (in vitro or in vivo) can be adapted for use with the compositions described herein. For example, delivery can be by local administration, (e.g., direct injection, implantation, or topical administering), systemic administration, or subcutaneous, intravenous, intraperitoneal, or parenteral routes, including intracranial (e.g., intraventricular, intraparenchymal and intrathecal), intramuscular, transdermal, airway (aerosol), nasal, oral, rectal, or topical (including buccal and sublingual) administration. In some embodiments, the compositions are administered via inhalation, intranasal administration, oropharyngeal aspiration administration, or intratracheal administration. For example, in some embodiments, it is desired that the IAV RNAi agents described herein inhibit the expression of an influenza A viral genome or the genome of another influenza virus in the pulmonary epithelium, for which administration via inhalation (e.g., by an inhaler device, such as a metered-dose inhaler, or a nebulizer such as a jet or vibrating mesh nebulizer, or a soft mist inhaler) is particularly suitable and advantageous

[0231] In some embodiments, the pharmaceutical compositions described herein comprise one or more pharmaceutically acceptable excipients. The pharmaceutical compositions described herein are formulated for administration to a subject.

[0232] As used herein, a pharmaceutical composition or medicament includes a pharmacologically effective amount of at least one of the described therapeutic compounds and one or more pharmaceutically acceptable excipients. Pharmaceutically acceptable excipients (excipients) are substances other than the Active Pharmaceutical Ingredient (API, therapeutic product, e.g., IAV RNAi agent) that are intentionally included in the drug delivery system. Excipients do not exert or are not intended to exert a therapeutic effect at the intended dosage. Excipients can act to a) aid in processing of the drug delivery system during manufacture, b) protect, support or enhance stability, bioavailability or patient acceptability of the API, c) assist in product identification, and/or d) enhance any other attribute of the overall safety, effectiveness, of delivery of the API during storage or use. A pharmaceutically acceptable excipient may or may not be an inert substance.

[0233] Excipients include, but are not limited to: absorption enhancers, anti-adherents, anti-foaming agents, anti-oxidants, binders, buffering agents, carriers, coating agents, colors, delivery enhancers, delivery polymers, detergents, dextran, dextrose, diluents, disintegrants, emulsifiers, extenders, fillers, flavors, glidants, humectants, lubricants, oils, polymers, preservatives, saline, salts, solvents, sugars, surfactants, suspending agents, sustained release matrices, sweeteners, thickening agents, tonicity agents, vehicles, water-repelling agents, and wetting agents.

[0234] Pharmaceutical compositions suitable for injectable use include sterile aqueous solutions (where water-soluble) or dispersions and sterile powders for the extemporaneous preparation of sterile injectable solutions or dispersion. For intravenous administration, suitable carriers include physiological saline, bacteriostatic water, Cremophor® EL™ (BASF, Parsippany, NJ) or phosphate buffered saline (PBS). It should be stable under the conditions of manufacture and storage and should be preserved against the contaminating action of microorganisms such as bacteria and fungi. The carrier can be a solvent or dispersion medium containing, for example, water, ethanol, polyol (for example, glycerol, propylene glycol, and liquid polyethylene glycol), and suitable mixtures thereof. The proper fluidity can be maintained, for example, by the use of a coating such as lecithin, by the maintenance of the required particle size in the case of dispersion and by the use of surfactants. In many cases, it will be preferable to include isotonic agents, for example, sugars, polyalcohols such as mannitol, sorbitol, and sodium chloride in the composition. Prolonged absorption of the injectable compositions can be brought about by including in the composition an agent which delays absorption, for example, aluminum monostearate and gelatin.

[0235] Sterile injectable solutions can be prepared by incorporating the active compound in the required amount in an appropriate solvent with one or a combination of ingredients enumerated above, as required, followed by filter sterilization. Generally, dispersions are prepared by incorporating the active compound into a sterile vehicle which contains a basic dispersion medium and the required other ingredients from those enumerated above. In the case of sterile powders for the preparation of sterile injectable solutions, methods of preparation include vacuum drying and freeze-drying which yields a powder of the active ingredient plus any additional desired ingredient from a previously sterile-filtered solution thereof.

[0236] Formulations suitable for intra-articular administration can be in the form of a sterile aqueous preparation of the drug that can be in microcrystalline form, for example, in the form of an aqueous microcrystalline suspension. Liposomal formulations or biodegradable polymer systems can also be used to present the drug for both intra-articular and ophthalmic administration.

[0237] Formulations suitable for inhalation administration can be prepared by incorporating the active compound in the desired amount in an appropriate solvent, followed by sterile filtration. In general, formulations for inhalation administration are sterile solutions at physiological pH and have low viscosity (<5 cP). Salts may be added to the formulation to balance tonicity. In some cases, surfactants or co-solvents can be added to increase active compound solubility and improve aerosol characteristics. In some cases, excipients can be added to control viscosity in order to ensure size and distribution of nebulized droplets.

[0238] In some embodiments, pharmaceutical formulations that include the IAV RNAi agents disclosed herein suitable for inhalation administration can be prepared in water for injection (sterile water), or an aqueous sodium phosphate buffer (for example, the IAV RNAi agent formulated in 0.5 mM sodium phosphate monobasic, 0.5 mM sodium phosphate dibasic, in water).

[0239] The active compounds can be prepared with carriers that will protect the compound against rapid elimination from the body, such as a controlled release formulation, including implants and microencapsulated delivery systems. Biodegradable, biocompatible polymers can be used, such as ethylene vinyl acetate, polyanhydrides, polyglycolic acid, collagen, polyorthoesters, and polylactic acid. Methods for preparation of such formulations will be apparent to those skilled in the art. Liposomal suspensions can also be used as pharmaceutically acceptable carriers. These can be prepared according to methods known to those skilled in the art, for example, as described in U.S. Pat. No. 4,522,811.

[0240] The IAV RNAi agents can be formulated in compositions in dosage unit form for ease of administration and uniformity of dosage. Dosage unit form refers to physically discrete units suited as unitary dosages for the subject to be treated; each unit containing a predetermined quantity of active compound calculated to produce the desired therapeutic effect in association with the required pharmaceutical carrier. The specification for the dosage unit forms of the disclosure are dictated by and directly dependent on the unique characteristics of the active compound and the therapeutic effect to be achieved, and the limitations inherent in the art of compounding such an active compound for the treatment of individuals.

[0241] A pharmaceutical composition can contain other additional components commonly found in pharmaceutical compositions. Such additional components include, but are not limited to: anti-pruritics, astringents, local anesthetics, or anti-inflammatory agents (e.g., antihistamine, diphenhydramine, etc.). It is also envisioned that cells, tissues, or isolated organs that express or comprise the herein defined RNAi agents may be used as “pharmaceutical compositions.” As used herein, “pharmacologically effective amount,” “therapeutically effective amount,” or simply “effective amount” refers to that amount of an RNAi agent to produce a pharmacological, therapeutic, or preventive result.

[0242] In some embodiments, the methods disclosed herein further comprise the step of administering a second therapeutic or treatment in addition to administering an RNAi agent disclosed herein. In some embodiments, the second therapeutic is another IAV RNAi agent (e.g., an IAV RNAi agent that targets a different sequence within the influenza A viral genome target). In other embodiments, the second therapeutic can be a small molecule drug, an antibody, an antibody fragment, a peptide, a vaccine, and/or an aptamer.

[0243] In some embodiments, described herein are compositions that include a combination or cocktail of at least two IAV RNAi agents having different sequences. In some embodiments, the two or more IAV RNAi agents are each separately and independently linked to targeting groups. In some embodiments, the two or more IAV RNAi agents are each linked to targeting groups that include or consist of integrin targeting ligands. In some embodiments, the two or more IAV RNAi agents are each linked to targeting groups that include or consist of αvβ6 integrin targeting ligands.

[0244] Described herein are compositions for delivery of IAV RNAi agents to pulmonary epithelial cells.

[0245] Generally, an effective amount of an IAV RNAi agent disclosed herein will be in the range of from about 0.0001 to about 30 mg/kg of body weight/deposited dose, e.g., from about 0.001 to about 5 mg/kg of body weight/deposited dose. In some embodiments, an effective amount of an IAV RNAi agent will be in the range of from about 0.01 mg/kg to about 3.0 mg/kg of body weight per deposited dose. In some embodiments, an effective amount of an IAV RNAi agent will be in the range of from about 0.03 mg/kg to about 2.0 mg/kg of body weight per deposited dose. In some embodiments, an effective amount of an IAV RNAi agent will be in the range of from about 0.01 to about 1.0 mg/kg of deposited dose per body weight. In some embodiments, an effective amount of an IAV RNAi agent will be in the range of from about 0.50 to about 1.0 mg/kg of deposited dose per body weight. The amount administered will also likely depend on such variables as the overall health status of the patient, the relative biological efficacy of the compound delivered, the formulation of the drug, the presence and types of excipients in the formulation, and the route of administration. Also, it is to be understood that the initial dosage administered can be increased beyond the above upper level to rapidly achieve the desired blood-level or tissue level, or the initial dosage can be smaller than the optimum. In some embodiments, a dose is administered daily. In some embodiments, a dose is administered weekly. In further embodiments, a dose is administered bi-weekly, tri-weekly, once monthly, or once quarterly (i.e., once every three months).

[0246] For treatment of disease or for formation of a medicament or composition for treatment of a disease, the pharmaceutical compositions described herein including an IAV RNAi agent can be combined with an excipient or with a second therapeutic agent or treatment including, but not limited to: a second or other RNAi agent, a small molecule drug, an antibody, an antibody fragment, a peptide, a vaccine and/or an aptamer.

[0247] The described IAV RNAi agents, when added to pharmaceutically acceptable excipients or adjuvants, can be packaged into kits, containers, packs, or dispensers. The pharmaceutical compositions described herein can be packaged in dry powder or aerosol inhalers, other metered-dose inhalers, nebulizers, pre-filled syringes, or vials.

### Methods of Treatment and Inhibition of Influenza A Viral Genomes

[0248] The IAV RNAi agents disclosed herein can be used to treat a subject (e.g., a human or other mammal) having a disease or disorder that would benefit from administration of the RNAi agent. In some embodiments, the RNAi agents disclosed herein can be used to treat a subject (e.g., a human) that would benefit from a reduction and/or inhibition in expression of influenza A viral genome mRNA and/or viral transcripts, or a reduction and/or inhibition of another influenza virus that is infecting the subject.

[0249] In some embodiments, the RNAi agents disclosed herein can be used to treat a subject (e.g., a human) having a disease or disorder caused by an influenza virus infection, including but not limited to, pulmonary inflammation or symptoms and diseases associated influenza A viral infection, including but not limited to infection of the nose, throat, lungs, and other parts of the respiratory system. Treatment of a subject can include therapeutic and/or prophylactic treatment. The subject is administered a therapeutically effective amount of any one or more IAV RNAi agents described herein. The subject can be a human, patient, or human patient. The subject may be an adult, adolescent, child, or infant. Administration of a pharmaceutical composition described herein can be to a human being or animal.

[0250] In certain embodiments, the present disclosure provides methods for treatment of diseases, disorders, conditions, or pathological states mediated at least in part by influenza A viral genome viral genome expression, in a patient in need thereof, wherein the methods include administering to the patient any of the IAV RNAi agents described herein.

[0251] In some embodiments, the IAV RNAi agents are used to treat or manage a clinical presentation or pathological state in a subject, wherein the clinical presentation or pathological state is caused by an influenza virus infection. The subject is administered a therapeutically effective amount of one or more of the IAV RNAi agents or IAV RNAi agent-containing compositions described herein. In some embodiments, the method comprises administering a composition comprising an IAV RNAi agent described herein to a subject to be treated.

[0252] In a further aspect, the disclosure features methods of treatment (including prophylactic or preventative treatment) of diseases or symptoms that may be addressed by a reduction in influenza mRNA or RNA transcripts, including for example a reduction in influenza A viral genome mRNA or RNA transcripts, the methods comprising administering to a subject in need thereof an IAV RNAi agent that includes an antisense strand comprising the sequence of any of the sequences in Table 2A, 2B, 2C, 2D, 2E, 2F, 3A, 3B, 3C, 3D, 3E, 3F, 10A, 10B, 10C, 10D, 10E, or 10F. Also described herein are compositions for use in such methods.

[0253] In another aspect, the disclosure provides methods for the treatment (including prophylactic treatment) of a pathological state (such as a condition or disease) caused by an influenza virus infection, wherein the methods include administering to a subject a therapeutically effective amount of an RNAi agent that includes an antisense strand comprising the sequence of any of the sequences in Table 2A, 2B, 2C, 2D, 2E, 2F, 3A, 3B, 3C, 3D, 3E, 3F, 10A, 10B, 10C, 10D, 10E, or 10F.

[0254] In some embodiments, methods for inhibiting expression of an influenza A viral genome viral genome are disclosed herein, wherein the methods include administering to a cell an RNAi agent that includes an antisense strand comprising the sequence of any of the sequences in Table 2A, 2B, 2C, 2D, 2E, 2F, 3A, 3B, 3C, 3D, 3E, 3F, 10A, 10B, 10C, 10D, 10E, or 10F.

[0255] In some embodiments, methods for the treatment (including prophylactic treatment) of a pathological state mediated at least in part by influenza A viral RNA are disclosed herein, wherein the methods include administering to a subject a therapeutically effective amount of an RNAi agent that includes a sense strand comprising the sequence of any of the sequences in Table 2A, 2B, 2C, 2D, 2E, 2F, 4A, 4B, 4C, 4D, 4E, 4F, 5A, 5B, 5C, 5D, 5E, 5F, 6A, 6B, 6C, 6D, 6E, 6F, 10A, 10B, 10C, 10D, 10E, or 10F.

[0256] In some embodiments, methods for inhibiting expression of a Influenza A viral genome viral genome are disclosed herein, wherein the methods comprise administering to a cell an RNAi agent that includes a sense strand comprising the sequence of any of the sequences in Table 2A, 2B, 2C, 2D, 2E, 2F, 4A, 4B, 4C, 4D, 4E, 4F, 5A, 5B, 5C, 5D, 5E, 5F, 6A, 6B, 6C, 6D, 6E, 6F, 10A, 10B, 10C, 10D, 10E, or 10F.

[0257] In some embodiments, methods for the treatment (including prophylactic treatment) of a pathological state mediated at least in part by Influenza A viral genome viral RNA are disclosed herein, wherein the methods include administering to a subject a therapeutically effective amount of an RNAi agent that includes a sense strand comprising the sequence of any of the sequences in Table 4A, 4B, 4C, 4D, 4E, 4F, 5A, 5B, 5C, 5D, 5E, 5F, 6A, 6B, 6C, 6D, 6E, 6F, 10A, 10B, 10C, 10D, 10E, or 10F, and an antisense strand comprising the sequence of any of the sequences in Table 3A, 3B, 3C, 3D, 3E, 3F, 10A, 10B, 10C, 10D, 10E, or 10F.

[0258] In some embodiments, methods for inhibiting expression of an influenza A viral genome are disclosed herein, wherein the methods include administering to a cell an RNAi agent that includes a sense strand comprising the sequence of any of the sequences in Table 4A, 4B, 4C, 4D, 4E, 4F, 5A, 5B, 5C, 5D, 5E, 5F, 6A, 6B, 6C, 6D, 6E, 6F, 10A, 10B, 10C, TOD, 10E, or 10F, and an antisense strand comprising the sequence of any of the sequences in Table 3A, 3B, 3C, 3D, 3E, 3F, 10A, 10B, 10C, 10D, 10E, or 10F.

[0259] In some embodiments, methods of inhibiting expression of an influenza A viral genome are disclosed herein, wherein the methods include administering to a subject an IAV RNAi agent that includes a sense strand consisting of the nucleobase sequence of any of the sequences in Table 4A, 4B, 4C, 4D, 4E, 4F, 5A, 5B, 5C, 5D, 5E, 5F, 6A, 6B, 6C, 6D, 6E, 6F, 10A, 10B, 10C, 10D, 10E, or 10F, and the antisense strand consisting of the nucleobase sequence of any of the sequences in Table 3A, 3B, 3C, 3D, 3E, 3F, 10A, 10B, 10C, 10D, 10E, or 10F. In other embodiments, disclosed herein are methods of inhibiting expression of an influenza A viral genome, wherein the methods include administering to a subject an IAV RNAi agent that includes a sense strand consisting of the modified sequence of any of the modified sequences in Table 4A, 4B, 4C, 4D, 4E, 4F, 5A, 5B, 5C, 5D, 5E, 5F, 6A, 6B, 6C, 6D, 6E, 6F, 10A, 10B, 10C, 10D, 10E, or 10F, and the antisense strand consisting of the modified sequence of any of the modified sequences in Table 3A, 3B, 3C, 3D, 3E, 3F, 10A, 10B, 10C, 10D, 10E, or 10F.

[0260] In some embodiments, methods for inhibiting expression of an influenza A viral genome in a cell are disclosed herein, wherein the methods include administering one or more IAV RNAi agents comprising a duplex structure of one of the duplexes set forth in Tables 7A-1, 7A-2, 7A-3, 7A-4, 7A-5, 7A-6, 7B-1, 7B-2, 7B-3, 7B-4, 7B-5, 7B-6, 8A, 8B, 8C, 8D, 8E, 8F, 9A, 9B, 9C, 9D, 9E, and 9F.

[0261] In some embodiments, methods for inhibiting expression of an influenza A viral genome are disclosed herein, wherein the methods include administering one or more IAV RNAi agents directed to Influenza A virus (A/California/07/2009(H1N1)) segment 7 matrix protein 2 (M2) and matrix protein 1 (M1) genes (referred to herein as M1). In some embodiments, methods for inhibiting expression of an influenza A viral genome are disclosed herein, wherein the methods include administering to a subject an IAV RNAi agent that includes a sense strand consisting of the nucleobase sequence of any of the sequences in Table 4A, 5A, 6A, or 10A, and the antisense strand consisting of the nucleobase sequence of any of the sequences in Table 3A or 10A. In other embodiments, disclosed herein are methods of inhibiting expression of an influenza A viral genome, wherein the methods include administering to a subject an IAV RNAi agent that includes a sense strand consisting of the modified sequence of any of the modified sequences in Table 4A, 5A, 6A, or 10A, and the antisense strand consisting of the modified sequence of any of the modified sequences in Table 3A or 10A.

[0262] In some embodiments, methods for inhibiting expression of an influenza A viral genome are disclosed herein, wherein the methods include administering one or more IAV RNAi agents directed to Influenza A virus (A/California/07/2009(H1N1)) segment 8 nuclear export protein (NEP) and nonstructural protein 1 (NS1) genes. In some embodiments, methods for inhibiting expression of an influenza A viral genome are disclosed herein, wherein the methods include administering to a subject an IAV RNAi agent that includes a sense strand consisting of the nucleobase sequence of any of the sequences in Table 4B, 5B, 6B, or 10B, and the antisense strand consisting of the nucleobase sequence of any of the sequences in Table 3B or 10B. In other embodiments, disclosed herein are methods of inhibiting expression of an influenza A viral genome, wherein the methods include administering to a subject an IAV RNAi agent that includes a sense strand consisting of the modified sequence of any of the modified sequences in Table 4B, 5B, 6B, or 10B, and the antisense strand consisting of the modified sequence of any of the modified sequences in Table 3B or 10B.

[0263] In some embodiments, methods for inhibiting expression of an influenza A viral genome are disclosed herein, wherein the methods include administering one or more IAV RNAi agents directed to Influenza A virus (A/California/07/2009(H1N1)) segment 2 polymerase PB1 (PB1) gene and nonfunctional PB1-F2 protein (PB1-F2) gene. In some embodiments, methods for inhibiting expression of an influenza A viral genome are disclosed herein, wherein the methods include administering to a subject an IAV RNAi agent that includes a sense strand consisting of the nucleobase sequence of any of the sequences in Table 4C, 5C, 6C, or 10C, and the antisense strand consisting of the nucleobase sequence of any of the sequences in Table 3C or 10C. In other embodiments, disclosed herein are methods of inhibiting expression of an influenza A viral genome, wherein the methods include administering to a subject an IAV RNAi agent that includes a sense strand consisting of the modified sequence of any of the modified sequences in Table 4C, 5C, 6C, or 10C, and the antisense strand consisting of the modified sequence of any of the modified sequences in Table 3C or 10C.

[0264] In some embodiments, methods for inhibiting expression of an influenza A viral genome are disclosed herein, wherein the methods include administering one or more IAV RNAi agents directed to Influenza A virus (A/California/07/2009(H1N1)) segment 1 polymerase PB2 (PB2) gene. In some embodiments, methods for inhibiting expression of an influenza A viral genome are disclosed herein, wherein the methods include administering to a subject an IAV RNAi agent that includes a sense strand consisting of the nucleobase sequence of any of the sequences in Table 4D, 5D, 6D, or 10D, and the antisense strand consisting of the nucleobase sequence of any of the sequences in Table 3D or TOD. In other embodiments, disclosed herein are methods of inhibiting expression of an influenza A viral genome, wherein the methods include administering to a subject an IAV RNAi agent that includes a sense strand consisting of the modified sequence of any of the modified sequences in Table 4D, 5D, 6D, or 10D, and the antisense strand consisting of the modified sequence of any of the modified sequences in Table 3D or 10D.

[0265] In some embodiments, methods for inhibiting expression of an influenza A viral genome are disclosed herein, wherein the methods include administering one or more IAV RNAi agents directed to Influenza A virus (A/California/07/2009(H1N1)) segment 5 nucleocapsid protein (NP) gene. In some embodiments, methods for inhibiting expression of an influenza A viral genome are disclosed herein, wherein the methods include administering to a subject an IAV RNAi agent that includes a sense strand consisting of the nucleobase sequence of any of the sequences in Table 4E, 5E, 6E, or 10E, and the antisense strand consisting of the nucleobase sequence of any of the sequences in Table 3E or 10E. In other embodiments, disclosed herein are methods of inhibiting expression of an influenza A viral genome, wherein the methods include administering to a subject an IAV RNAi agent that includes a sense strand consisting of the modified sequence of any of the modified sequences in Table 4E, 5E, 6E, or 10E, and the antisense strand consisting of the modified sequence of any of the modified sequences in Table 3E or 10E.

[0266] In some embodiments, methods for inhibiting expression of an influenza A viral genome are disclosed herein, wherein the methods include administering one or more IAV RNAi agents directed to Influenza A virus (A/California/07/2009(H1N1)) segment 3 polymerase PA (PA) gene. In some embodiments, methods for inhibiting expression of an influenza A viral genome are disclosed herein, wherein the methods include administering to a subject an IAV RNAi agent that includes a sense strand consisting of the nucleobase sequence of any of the sequences in Table 4F, 5F, 6F, or 10F, and the antisense strand consisting of the nucleobase sequence of any of the sequences in Table 3F or 10F. In other embodiments, disclosed herein are methods of inhibiting expression of an influenza A viral genome, wherein the methods include administering to a subject an IAV RNAi agent that includes a sense strand consisting of the modified sequence of any of the modified sequences in Table 4F, 5F, 6F, or 10F, and the antisense strand consisting of the modified sequence of any of the modified sequences in Table 3F or 10F.

[0267] In some embodiments, methods for inhibiting expression of an influenza A viral genome are disclosed herein, wherein the methods include administering one or more IAV RNAi agents directed to a single influenza A viral gene selected from the group consisting of: M1 (which includes M2), NEP, NS1, PB1, PB1-F2, PB2, NP, and PA.

[0268] In some embodiments, methods for inhibiting expression of an influenza A viral genome are disclosed herein, wherein the methods include administering one or more IAV RNAi agents directed to a combination of two or more influenza A viral genomes selected from the group consisting of: M1 (which includes M2), NEP, NS1, PB1, PB1-F2, PB2, NP, and PA.

[0269] In some embodiments, the influenza A viral RNA level in certain epithelial cells of subject to whom a described IAV RNAi agent is administered is reduced by at least about 5%, 10%, 15%, 20%, 25%, 30%, 35%, 40%, 45%, 50%, 55%, 60%, 65%, 70%, 75%, 80%, 85%, 90%, 95%, 96%, 97%, 98%, 99%, or greater than 99%, relative to the subject prior to being administered the IAV RNAi agent or to a subject not receiving the IAV RNAi agent. In some embodiments, the influenza A viral subgenomic RNA levels in certain epithelial cells of a subject to whom a described IAV RNAi agent is administered is reduced by at least about 5%, 10%, 15%, 20%, 25%, 30%, 35%, 40%, 45%, 50%, 55%, 60%, 65%, 70%, 75%, 80%, 85%, 90%, 95%, 96%, 97%, 98%, 99%, or greater than 99%, relative to the subject prior to being administered the IAV RNAi agent or to a subject not receiving the IAV RNAi agent. The viral RNA transcript level, mRNA level, and/or subgenomic RNA level in the subject may be reduced in a cell, group of cells, and/or tissue of the subject. In some embodiments, the influenza mRNA levels in certain epithelial cells subject to whom a described IAV RNAi agent has been administered is reduced by at least about 30%, 35%, 40%, 45%, 50%, 55%, 60%, 65%, 70%, 75%, 80%, 85%, 90%, 95%, or 98% relative to the subject prior to being administered the IAV RNAi agent or to a subject not receiving the IAV RNAi agent.

[0270] Reductions in viral RNA can be assessed by any methods known in the art and are collectively referred to herein as a decrease in, reduction of, or inhibition of influenza A viral genome. The Examples set forth herein illustrate known methods for assessing inhibition of Influenza A viral genome viral RNA.

### Cells, Tissues, Organs, and Non-Human Organisms

[0271] Cells, tissues, organs, and non-human organisms that include at least one of the IAV RNAi agents described herein are contemplated. The cell, tissue, organ, or non-human organism is made by delivering the RNAi agent to the cell, tissue, organ, or non-human organism.

### Additional Illustrative Embodiments

[0272] Provided here are certain additional illustrative embodiments of the disclosed technology. These embodiments are illustrative only and do not limit the scope of the present disclosure or of the claims attached hereto.
[0273] 1. An RNAi agent for inhibiting expression of an influenza A viral genome, comprising:
   [0274] an antisense strand comprising at least 17 contiguous nucleotides differing by 0 or 1 nucleotides from any one of the sequences provided in Table 2A, 2B, 2C, 2D, 2E, 2F, 3A, 3B, 3C, 3D, 3E, or 3F; and
   [0275] a sense strand comprising a nucleotide sequence that is at least partially complementary to the antisense strand.
[0276] 2. The RNAi agent of embodiment 1, wherein the antisense strand comprises nucleotides 2-18 of any one of the sequences provided in Table 2A, 2B, 2C, 2D, 2E, 2F, 3A, 3B, 3C, 3D, 3E, or 3F.
[0277] 3. The RNAi agent of embodiment 1 or embodiment 2, wherein the sense strand comprises a nucleotide sequence of at least 17 contiguous nucleotides differing by 0 or 1 nucleotides from any one of the sequences provided in Table 2A, 2B, 2C, 2D, 2E, 2F, 4A, 4B, 4C, 4D, 4E, or 4F, and wherein the sense strand has a region of at least 85% complementarity over the 17 contiguous nucleotides to the antisense strand.
[0278] 4. The RNAi agent of any one of embodiments 1-3, wherein at least one nucleotide of the IAV RNAi agent is a modified nucleotide or includes a modified internucleoside linkage.
[0279] 5. The RNAi agent of any one of embodiments 1-4, wherein all or substantially all of the nucleotides are modified nucleotides.
[0280] 6. The RNAi agent of any one of embodiments 4-5, wherein the modified nucleotide is selected from the group consisting of: 2′-O-methyl nucleotide, 2′-fluoro nucleotide, 2′-deoxy nucleotide, 2′,3′-seco nucleotide mimic, locked nucleotide, 2′-F-arabino nucleotide, 2′-methoxyethyl nucleotide, abasic nucleotide, ribitol, inverted nucleotide, inverted 2′-O-methyl nucleotide, inverted 2′-deoxy nucleotide, 2′-amino-modified nucleotide, 2′-alkyl-modified nucleotide, morpholino nucleotide, vinyl phosphonate-containing nucleotide, cyclopropyl phosphonate-containing nucleotide, and 3′-O-methyl nucleotide.
[0281] 7. The RNAi agent of embodiment 5, wherein all or substantially all of the nucleotides are modified with 2′-O-methyl nucleotides, 2′-fluoro nucleotides, or combinations thereof.
[0282] 8. The RNAi agent of any one of embodiments 1-7, wherein the antisense strand comprises the nucleotide sequence of any one of the modified sequences provided in Table 3A, 3B, 3C, 3D, 3E, and 3F.
[0283] 9. The RNAi agent of any one of embodiments 1-8, wherein the sense strand comprises the nucleotide sequence of any one of the modified sequences provided in Table 4A, 4B, 4C, 4D. 4E, and 4F.
[0284] 10. The RNAi agent of embodiment 1, wherein the antisense strand comprises the nucleotide sequence of any one of the modified sequences provided in Table 3A, 3B, 3C, 3D, 3E, and 3F, and the sense strand comprises the nucleotide sequence of any one of the modified sequences provided in Table 4A, 4B, 4C, 4D, 4E, and 4F.
[0285] 11. The RNAi agent of any one of embodiments 1-10, wherein the sense strand is between 18 and 30 nucleotides in length, and the antisense strand is between 18 and 30 nucleotides in length.
[0286] 12. The RNAi agent of embodiment 11, wherein the sense strand and the antisense strand are each between 18 and 27 nucleotides in length.
[0287] 13. The RNAi agent of embodiment 12, wherein the sense strand and the antisense strand are each between 18 and 24 nucleotides in length.
[0288] 14. The RNAi agent of embodiment 13, wherein the sense strand and the antisense strand are each 21 nucleotides in length.
[0289] 15. The RNAi agent of embodiment 14, wherein the RNAi agent has two blunt ends.
[0290] 16. The RNAi agent of any one of embodiments 1-15, wherein the sense strand comprises one or two terminal caps.
[0291] 17. The RNAi agent of any one of embodiments 1-16, wherein the sense strand comprises one or two inverted abasic residues.
[0292] 18. The RNAi agent of embodiment 1, wherein the RNAi agent is comprised of a sense strand and an antisense strand that form a duplex having the structure of any one of the duplexes in Table 7A-1, 7A-2, 7A-3, 7A-4, 7A-5, 7A-6, 7B-1, 7B-2, 7B-3, 7B-4, 7B-5, 7B-6, 8A, 8B, 8C, 8D, 8E, 8F, 9A, 9B, 9C, 9D, 9E, 9F, 10A, 10B, 10C, 10D, 10E, or 10F.
[0293] 19. The RNAi agent of embodiment 18, wherein all or substantially all of the nucleotides are modified nucleotides.
[0294] 20. The RNAi agent of embodiment 1, comprising an antisense strand that consists of, consists essentially of, or comprises a nucleotide sequence that differs by 0 or 1 nucleotides from the following nucleotide sequences (5′→3′):

(SEQ ID NO: 1590)
UUACGUUUCGACCUCGGUUAG.

[0295] 21. The RNAi agent of embodiment 20, wherein the sense strand consists of, consists essentially of, or comprises a nucleotide sequence that differs by 0 or 1 nucleotides from the following nucleotide sequences 5′→3′):

(SEQ ID NO: 1706)
CUAACCGAGGUCGAAACGUAA.

[0296] 22. The RNAi agent of embodiment 20 or 21, wherein all or substantially all of the nucleotides are modified nucleotides.
[0297] 23. The RNAi agent of embodiment 1, comprising an antisense strand that comprises, consists of, or consists essentially of a modified nucleotide sequence that differs by 0 or 1 nucleotides from one of the following nucleotide sequences (5′→3′):

(SEQ ID NO: 1176)
cPrpusUfsascguUfucgaCfcUfcGfguuasg;
or
(SEQ ID NO: 1175)
cPrpusUfsascGfuuucgaCfcUfcGfguuasg;

[0298] wherein a represents 2′-O-methyl adenosine, c represents 2′-O-methyl cytidine, g represents 2′-O-methyl guanosine, and u represents 2′-O-methyl uridine; Af represents 2′-fluoro adenosine, Cf represents 2′-fluoro cytidine, Gf represents 2′-fluoro guanosine, and Uf represents 2′-fluoro uridine; cPrpu represents a 5′-cyclopropyl phosphonate-2′-O-methyl uridine; s represents a phosphorothioate linkage; and wherein all or substantially all of the nucleotides on the sense strand are modified nucleotides.
[0299] 24. The RNAi agent of embodiment 1, wherein the sense strand comprises, consists of, or consists essentially of a modified nucleotide sequence that differs by 0 or 1 nucleotides from one of the following nucleotide sequences (5′→3′):

(SEQ ID NO: 1373)
csuaaccgaGfgUfcGfaaacguaa;
or
(SEQ ID NO: 1374)
csuaaccgaGfgUfcgaaacguaa;

[0300] wherein a represents 2′-O-methyl adenosine, c represents 2′-O-methyl cytidine, g represents 2′-O-methyl guanosine, and u represents 2′-O-methyl uridine; Af represents 2′-fluoro adenosine, Cf represents 2′-fluoro cytidine, Gf represents 2′-fluoro guanosine, and Uf represents 2′-fluoro uridine; cPrpu represents a 5′-cyclopropyl phosphonate-2′-O-methyl uridine; s represents a phosphorothioate linkage; and wherein all or substantially all of the nucleotides on the antisense strand are modified nucleotides.
[0301] 25. The RNAi agent of any one of embodiments 20-24, wherein the sense strand further includes inverted abasic residues at the 3′ terminal end of the nucleotide sequence, at the 5′ end of the nucleotide sequence, or at both.
[0302] 26. The RNAi agent of any one of embodiments 1-25, wherein the RNAi agent is linked to a targeting ligand.
[0303] 27. The RNAi agent of embodiment 26, wherein the targeting ligand has affinity for a cell receptor expressed on an epithelial cell.
[0304] 28. The RNAi agent of embodiment 27, wherein the targeting ligand comprises an integrin targeting ligand.
[0305] 29. The RNAi agent of embodiment 28, wherein the integrin targeting ligand is an αvβ6 integrin targeting ligand.
[0306] 30. The RNAi agent of embodiment 29, wherein the targeting ligand comprises the structure:

[chemical structure]

or a pharmaceutically acceptable salt thereof, or

[chemical structure]

or a pharmaceutically acceptable salt thereof,
[0307] wherein [symbol] indicates the point of connection to the RNAi agent.
[0308] 31. The RNAi agent of any one of embodiments 26-29, wherein the targeting ligand has a structure selected from the group consisting of:

[chemical structure]

[chemical structure]

[chemical structure]

[chemical structure]

[chemical structure]

[chemical structure]

[chemical structure]

[chemical structure]

[chemical structure]

[0309] wherein [symbol] indicates the point of connection to the RNAi agent.
[0310] 32. The RNAi agent of embodiment 31, wherein RNAi agent is conjugated to a targeting ligand having the following structure:

[chemical structure]

[0311] 33. The RNAi agent of any one of embodiments 26-32, wherein the targeting ligand is conjugated to the sense strand.
[0312] 34. The RNAi agent of embodiment 33, wherein the targeting ligand is conjugated to the 5′ terminal end of the sense strand.
[0313] 35. The RNAi agent of any of embodiments 1-34, wherein the influenza A viral genome is selected from the viral genomes of the group consisting of:
   [0314] H1N1 viral genome;
   [0315] H2N2 viral genome;
   [0316] H3N2 viral genome;
   [0317] H5N1 viral genome;
   [0318] H7N9 viral genome; and
   [0319] H10N8 viral genome.
[0320] 36. A composition comprising the RNAi agent of any one of embodiments 1-35, wherein the composition further comprises a pharmaceutically acceptable excipient.
[0321] 37. The composition of embodiment 36, further comprising a second RNAi agent capable of inhibiting the expression of influenza A viral genome.
[0322] 38. The composition of embodiment 37, wherein the influenza A viral genome is selected from the viral genomes of the group consisting of.
   [0323] H1N1 viral genome;
   [0324] H2N2 viral genome;
   [0325] H3N2 viral genome;
   [0326] H5N1 viral genome;
   [0327] H7N9 viral genome; and
   [0328] H10N8 viral genome.
[0329] 39. The composition of any one of embodiments 36-38, further comprising one or more additional therapeutics.
[0330] 40. The composition of any one of embodiments 36-39, wherein the composition is formulated for administration by inhalation.
[0331] 41. The composition of embodiment 40, wherein the composition is delivered by a metered-dose inhaler, jet nebulizer, vibrating mesh nebulizer, or soft mist inhaler.
[0332] 42. The composition of any of embodiments 36-41, wherein the RNAi agent is a sodium salt.
[0333] 43. The composition of embodiment 36, wherein the pharmaceutically acceptable excipient is water for injection.
[0334] 44. The composition of embodiment 36, wherein the pharmaceutically acceptable excipient is a buffered saline solution.
[0335] 45. A method for inhibiting expression of an influenza A viral genome in a cell and/or treating one or more symptoms or diseases associated with influenza A viral infection, the method comprising introducing into a cell and/or administering to a subject, an effective amount of an RNAi agent wherein the RNAi agent targets the M1 influenza A viral genomic segment transcript by having an antisense strand that comprises at least 15 contiguous nucleotides differing by 0, 1, 2, or 3 nucleotides that are complementary to a stretch of at least 15 contiguous nucleotides of SEQ ID NO. 1, and wherein the RNAi agent is optionally linked to a targeting ligand, preferably wherein the targeting ligand has affinity for a cell receptor expressed on an epithelial cell, and most preferably wherein the targeting ligand is an αvβ6 integrin targeting ligand.
[0336] 46. A method for inhibiting expression of an influenza A viral genome in a cell, the method comprising introducing into a cell an effective amount of an RNAi agent of any one of embodiments 1-35 or the composition of any one of embodiments 36-44.
[0337] 47. The method of embodiment 45 or 46, wherein the influenza A viral genome is selected from the viral genomes of the group consisting of:
   [0338] H1N1 viral genome;
   [0339] H2N2 viral genome;
   [0340] H3N2 viral genome;
   [0341] H5N1 viral genome;
   [0342] H7N9 viral genome; and
   [0343] H10N8 viral genome.
[0344] 48. The method of any of embodiments 45-47, wherein the cell is within a subject.
[0345] 49. The method of embodiment 48, wherein the subject is a human subject.
[0346] 50. The method of any one of embodiments 45-49, wherein following the administration of the RNAi agent the influenza A viral genome is inhibited by at least about 30%.
[0347] 51. A method of treating one or more symptoms or diseases associated with influenza A viral infection, the method comprising administering to a human subject in need thereof a therapeutically effective amount of the composition of any one of embodiments 36-44.
[0348] 52. The method of embodiment 45 or embodiment 51, wherein the disease is a respiratory disease.
[0349] 53. The method of embodiment 52, wherein the respiratory disease is pulmonary inflammation.
[0350] 54. The method of embodiment 52, wherein the disease is influenza A viral infection.
[0351] 55. The method of embodiment 54, wherein the influenza A viral infection is caused by an influenza A virus subtype selected group consisting of
   [0352] H1N1;
   [0353] H2N2;
   [0354] H3N2;
   [0355] H5N1;
   [0356] H7N9; and
   [0357] H10N8.
[0358] 56. The method of any one of embodiments 45-55, wherein the RNAi agent is administered at a deposited dose of about 0.01 mg/kg to about 5.0 mg/kg of body weight of the subject.
[0359] 57. The method of any one of embodiments 45-56, wherein the RNAi agent is administered at a deposited dose of about 0.03 mg/kg to about 2.0 mg/kg of body weight of the subject.
[0360] 58. The method of any one of embodiments 45-57, wherein the RNAi agent is administered in two or more doses.
[0361] 59. Use of the RNAi agent of any one of embodiments 1-35, for the treatment of a disease, disorder, or symptom that is mediated at least in part by influenza A viral genome activity and/or influenza A viral genome expression.
[0362] 60. Use of the composition according to any one of embodiments 36-44, for the treatment of a disease, disorder, or symptom that is mediated at least in part by influenza A viral genome activity and/or influenza A viral genome expression.
[0363] 61. Use of the composition according to any one of embodiments 36-44, for the manufacture of a medicament for treatment of a disease, disorder, or symptom that is mediated at least in part by influenza A viral genome and/or influenza A viral genome expression.
[0364] 62. The use of any one of embodiments 59-61, wherein the disease is influenza infection.
[0365] 63. A method of manufacturing an RNAi agent of any one of embodiments 1-35, comprising annealing a sense strand and an antisense strand to form a double-stranded ribonucleic acid molecule.
[0366] 64. The method of embodiment 63, wherein the sense strand comprises a targeting ligand.
[0367] 65. The method of embodiment 64, comprising conjugating a targeting ligand to the sense strand.

[0368] The above provided embodiments and items are now illustrated with the following, non-limiting examples.

### EXAMPLES

### Example 1. Synthesis of IAV RNAi Agents

[0369] IAV RNAi agent duplexes disclosed herein were synthesized in accordance with the following:

### A. Synthesis

[0370] The sense and antisense strands of the IAV RNAi agents were synthesized according to phosphoramidite technology on solid phase used in oligonucleotide synthesis. Depending on the scale, a MerMade96E® (Bioautomation), a MerMade12® (Bioautomation), or an OP Pilot 100 (GE Healthcare) was used. Syntheses were performed on a solid support made of controlled pore glass (CPG, 500 Å or 600 Å, obtained from Prime Synthesis, Aston, PA, USA). All RNA and 2′-modified RNA phosphoramidites were purchased from Thermo Fisher Scientific (Milwaukee, WI, USA). Specifically, the 2′-O-methyl phosphoramidites that were used included the following: (5′-O-dimethoxytrityl-N⁶-(benzoyl)-2′-O-methyl-adenosine-3′-O-(2-cyanoethyl-N,N-diisopropylamino) phosphoramidite, 5′-O-dimethoxy-trityl-N⁴-(acetyl)-2′-O-methyl-cytidine-3′-O-(2-cyanoethyl-N,N-diisopropyl-amino) phosphoramidite, (5′-O-dimethoxytrityl-N²-(isobutyryl)-2′-O-methyl-guanosine-3′-O-(2-cyanoethyl-N,N-diisopropylamino) phosphoramidite, and 5′-O-dimethoxytrityl-2′-O-methyl-uridine-3′-O-(2-cyanoethyl-N,N-diisopropylamino) phosphoramidite. The 2′-deoxy-2′-fluoro-phosphoramidites carried the same protecting groups as the 2′-O-methyl RNA amidites. 5′-dimethoxytrityl-2′-O-methyl-inosine-3′-O-(2-cyanoethyl-N,N-diisopropylamino) phosphoramidites were purchased from Glen Research (Virginia). The inverted abasic (3′-O-dimethoxytrityl-2′-deoxyribose-5′-O-(2-cyanoethyl-N,N-diisopropylamino) phosphoramidites were purchased from ChemGenes (Wilmington, MA, USA). The following UNA phosphoramidites were used: 5′-(4,4′-Dimethoxytrityl)-N6-(benzoyl)-2′,3′-seco-adenosine, 2′-benzoyl-3′-[(2-cyanoethyl)-(N,N-diisopropyl)]-phosphoramidite, 5′-(4,4′-Dimethoxytrityl)-N-acetyl-2′,3′-seco-cytosine, 2′-benzoyl-3′-[(2-cyanoethyl)-(N,N-diiso-propyl)]-phosphoramidite, 5′-(4,4′-Dimethoxytrityl)-N-isobutyryl-2′,3′-seco-guanosine, 2′-benzoyl-3′-[(2-cyanoethyl)-(N,N-diisopropyl)]-phosphoramidite, and 5′-(4,4′-Dimethoxy-trityl)-2′,3′-seco-uridine, 2′-benzoyl-3′-[(2-cyanoethyl)-(N,N-diiso-propyl)]-phosphoramidite. TFA aminolink phosphoramidites were also commercially purchased (ThermoFisher). Linker L6 was purchased as propargyl-PEG5-NHS from BroadPharm (catalog #BP-20907) and coupled to the NH₂-C₆ group from an aminolink phosphoramidite to form -L6-C6-, using standard coupling conditions. The linker Alk-cyHex was similarly commercially purchased from Lumiprobe (alkyne phosphoramidite, 5′-terminal) as a propargyl-containing compound phosphoramidite compound to form the linker -Alk-cyHex-. In each case, phosphorothioate linkages were introduced as specified using the conditions set forth herein. The cyclopropyl phosphonate phosphoramidites were synthesized in accordance with International Patent Application Publication No. WO 2017/214112 (see also Altenhofer et. al., Chem. Communications (Royal Soc. Chem.), 57(55):6808-6811 (July 2021)). The (NAG37)s targeting ligand phosphoramidite compounds used in synthesizing the RNAi agents disclosed herein for performing certain SEAP studies described below were synthesized in accordance with International Patent Application Publication No. WO 2018/044350 to Arrowhead Pharmaceuticals, Inc.; the targeting ligand-containing phosphoramidite compounds were added during the solid phase oligonucleotide synthesis process described herein.

[0371] Tri-alkyne-containing phosphoramidites were dissolved in anhydrous dichloromethane or anhydrous acetonitrile (50 mM), while all other amidites were dissolved in anhydrous acetonitrile (50 mM) and molecular sieves (3 Å) were added. 5-Benzylthio-1H-tetrazole (BTT, 250 mM in acetonitrile) or 5-Ethylthio-1H-tetrazole (ETT, 250 mM in acetonitrile) was used as activator solution. Coupling times were 10 minutes (RNA), 90 seconds (2′ O-Me), and 60 seconds (2′ F). In order to introduce phosphorothioate linkages, a 100 mM solution of 3-phenyl 1,2,4-dithiazoline-5-one (POS, obtained from PolyOrg, Inc., Leominster, MA, USA) in anhydrous acetonitrile was employed.

[0372] Alternatively, tri-alkyne moieties were introduced post-synthetically (see section E, below). For this route, the sense strand was functionalized with a 5′ and/or 3′ terminal nucleotide containing a primary amine. TFA aminolink phosphoramidite was dissolved in anhydrous acetonitrile (50 mM) and molecular sieves (3 Å) were added. 5-Benzylthio-1H-tetrazole (BTT, 250 mM in acetonitrile) or 5-Ethylthio-1H-tetrazole (ETT, 250 mM in acetonitrile) was used as activator solution. Coupling times were 10 minutes (RNA), 90 seconds (2′ O-Me), and 60 seconds (2′ F). In order to introduce phosphorothioate linkages, a 100 mM solution of 3-phenyl 1,2,4-dithiazoline-5-one (POS, obtained from PolyOrg, Inc., Leominster, MA, USA) in anhydrous acetonitrile was employed.

### B. Cleavage and Deprotection of Support Bound Oligomer

[0373] After finalization of the solid phase synthesis, the dried solid support was treated with a 1:1 volume solution of 40 wt. % methylamine in water and 28% to 31% ammonium hydroxide solution (Aldrich) for 1.5 hours at 30° C. The solution was evaporated and the solid residue was reconstituted in water (see below).

### C. Purification

[0374] Crude oligomers were purified by anionic exchange HPLC using a TSKgel SuperQ-5PW 13 μm column and Shimadzu LC-8 system. Buffer A was 20 mM Tris, 5 mM EDTA, pH 9.0 and contained 20% Acetonitrile and buffer B was the same as buffer A with the addition of 1.5 M sodium chloride. UV traces at 260 nm were recorded. Appropriate fractions were pooled then run on size exclusion HPLC using a GE Healthcare XK 16/40 column packed with Sephadex G-25 fine with a running buffer of 100 mM ammonium bicarbonate, pH 6.7 and 20% Acetonitrile or filtered water. Alternatively, pooled fractions were desalted and exchanged into an appropriate buffer or solvent system via tangential flow filtration.

### D. Annealing

[0375] Complementary strands were mixed by combining equimolar RNA solutions (sense and antisense) in 1×PBS (Phosphate-Buffered Saline, 1×, Corning, Cellgro) to form the RNAi agents. Some RNAi agents were lyophilized and stored at −15 to −25° C. Duplex concentration was determined by measuring the solution absorbance on a UV-Vis spectrometer in 1×PBS. The solution absorbance at 260 nm was then multiplied by a conversion factor (0.050 mg/(mL-cm)) and the dilution factor to determine the duplex concentration.

### E. Conjugation of Tri-Alkyne Linker

[0376] In some embodiments a tri-alkyne linker is conjugated to the sense strand of the RNAi agent on resin as a phosphoramidite (see Example 1G for the synthesis of an example tri-alkyne linker phosphoramidite and Example 1A for the conjugation of the phosphoramidite.). In other embodiments, a tri-alkyne linker may be conjugated to the sense strand following cleavage from the resin, described as follows: either prior to or after annealing, in some embodiments, the 5′ or 3′ amine functionalized sense strand is conjugated to a tri-alkyne linker. An example tri-alkyne linker structure that can be used in forming the constructs disclosed herein is as follows:

[chemical structure]

To conjugate the tri-alkyne linker to the annealed duplex, amine-functionalized duplex was dissolved in 90% DMSO/10% H₂O, at ˜50-70 mg/mL. 40 equivalents triethylamine was added, followed by 3 equivalents tri-alkyne-PNP. Once complete, the conjugate was precipitated twice in a solvent system of 1× phosphate buffered saline/acetonitrile (1:14 ratio), and dried.

### F. Synthesis of Targeting Ligand SM6.1 ((S)-3-(4-(4-((14-azido-3,6,9,12-tetraoxatetradecyl)oxy)naphthalen-1-yl)phenyl)-3-(2-(4-((4-methylpyridin-2-yl)amino)butanamido)acetamido)propanoic acid)

[chemical structure]

[0377] Compound 5 (tert-Butyl(4-methylpyridin-2-yl)carbamate) (0.501 g, 2.406 mmol, 1 equiv.) was dissolved in DMF (17 mL). To the mixture was added NaH (0.116 mg, 3.01 mmol, 1.25 eq, 60% dispersion in oil) The mixture stirred for 10 min before adding Compound 20 (Ethyl 4-Bromobutyrate (0.745 g, 3.82 mmol, 0.547 mL)) (Sigma 167118). After 3 hours the reaction was quenched with ethanol (18 mL) and concentrated. The concentrate was dissolved in DCM (50 mL) and washed with saturated aq. NaCl solution (1×50 mL), dried over Na₂SO₄, filtered and concentrated. The product was purified on silica column, gradient 0-5% Methanol in DCM.

[chemical structure]

[0378] Compound 21 was dissolved (0.80 g, 2.378 mmol) in 100 mL of Acetone:0.1 M NaOH [1:1]. The reaction was monitored by TLC (5% ethyl acetate in hexane). The organics were concentrated away, and the residue was acidified to pH 3-4 with 0.3 M Citric Acid (40 mL). The product was extracted with DCM (3×75 mL). The organics were pooled, dried over Na₂SO₄, filtered and concentrated. The product was used without further purification.

[chemical structure]

[0379] To a solution of Compound 22 (1.1 g, 3.95 mmol, 1 equiv.), Compound 45 (595 mg, 4.74 mmol, 1.2 equiv.), and TBTU (1.52 g, 4.74 mmol, 1.2 equiv.) in anhydrous DMF (10 mL) was added diisopropylethylamine (2.06 mL, 11.85 mmol, 3 equiv.) at 0° C. The reaction mixture was warmed to room temperature and stirred 3 hours. The reaction was quenched by saturated NaHCO₃ solution (10 mL). The aqueous phase was extracted with ethyl acetate (3×10 mL) and the organic phase was combined, dried over anhydrous Na₂SO₄, and concentrated. The product was separated by CombiFlash® using silica gel as the stationary phase. LC-MS: calculated [M+H]+ 366.20, found 367.

[chemical structure]

[0380] To a solution of compound 61 (2 g, 8.96 mmol, 1 equiv.), and compound 62 (2.13 mL, 17.93 mmol, 2 equiv.) in anhydrous DMF (10 mL) was added K₂CO₃ (2.48 g, 17.93 mmol, 2 equiv.) at 0° C. The reaction mixture was warmed to room temperature and stirred overnight. The reaction was quenched by water (10 mL). The aqueous phase was extracted with ethyl acetate (3×10 mL) and the organic phase was combined, dried over anhydrous Na₂SO₄, and concentrated. The product was separated by CombiFlash® using silica gel as the stationary phase.

[chemical structure]

[0381] To a solution of compound 60 (1.77 g, 4.84 mmol, 1 equiv.) in THF (5 mL) and H₂O (5 mL) was added lithium hydroxide monohydrate (0.61 g, 14.53 mmol, 3 equiv.) portion-wise at 0° C. The reaction mixture was warmed to room temperature. After stirring at room temperature for 3 hours, the reaction mixture was acidified by HCl (6 N) to pH 3.0. The aqueous phase was extracted with ethyl acetate (3×20 mL) and the organic layer was combined, dried over Na₂SO₄, and concentrated. LC-MS: calculated [M+H]+ 352.18, found 352.

[chemical structure]

[0382] To a solution of compound 63 (1.88 g, 6.0 mmol, 1.0 equiv.) in anhydrous THF (20 mL) was added n-BuLi in hexane (3.6 mL, 9.0 mmol, 1.5 equiv.) drop-wise at −78° C. The reaction was kept at −78° C. for another 1 hour. Triisopropylborate (2.08 mL, 9.0 mmol, 1.5 equiv.) was then added into the mixture at −78° C. The reaction was then warmed up to room temperature and stirred for another 1 hour. The reaction was quenched by saturated NH₄Cl solution (20 mL) and the pH was adjusted to 3. The aqueous phase was extracted with EtOAc (3×20 mL) and the organic phase was combined, dried over Na₂SO₄, and concentrated.

[chemical structure]

[0383] Compound 12 (300 mg, 0.837 mmol, 1.0 equiv.), Compound 65 (349 mg, 1.256 mmol, 1.5 equiv.), XPhos Pd G2 (13 mg, 0.0167 mmol, 0.02 equiv.), and K₃PO₄ (355 mg, 1.675 mmol, 2.0 equiv.) were mixed in a round-bottom flask. The flask was sealed with a screw-cap septum, and then evacuated and backfilled with nitrogen (this process was repeated a total of 3 times). Then, THF (8 mL) and water (2 mL) were added via syringe. The mixture was bubbled with nitrogen for 20 min and the reaction was kept at room temperature for overnight. The reaction was quenched with water (10 mL), and the aqueous phase was extracted with ethyl acetate (3×10 mL). The organic phase was dried over Na₂SO₄, concentrated, and purified via CombiFlash® using silica gel as the stationary phase and was eluted with 15% EtOAc in hexane. LC-MS: calculated [M+H]+ 512.24, found 512.56.

[chemical structure]

[0384] Compound 66 (858 mg, 1.677 mmol, 1.0 equiv.) was cooled by ice bath. HCl in dioxane (8.4 mL, 33.54 mmol, 20 equiv.) was added into the flask. The reaction was warmed to room temperature and stirred for another 1 hr. The solvent was removed by rotary evaporator and the product was directly used without further purification. LC-MS: calculated [M+H]+ 412.18, found 412.46.

[chemical structure]

[0385] To a solution of compound 64 (500 mg, 1.423 mmol, 1 equiv.), compound 67 (669 mg, 1.494 mmol, 1.05 equiv.), and TBTU (548 mg, 0.492 mmol, 1.2 equiv.) in anhydrous DMF (15 mL) was added diisopropylethylamine (0.744 mL, 4.268 mmol, 3 equiv.) at 0° C. The reaction mixture was warmed to room temperature and stirred for another 1 hr. The reaction was quenched by saturated NaHCO₃ aqueous solution (10 mL) and the product was extracted with ethyl acetate (3×20 mL). The organic phase was combined, dried over Na₂SO₄, and concentrated. The product was purified by CombiFlash® using silica gel as the stationary phase and was eluted with 3-4% methanol in DCM. The yield was 96.23%. LC-MS: calculated [M+H]+ 745.35, found 746.08.

[chemical structure]

[0386] To a solution of compound 68 (1.02 g, 1.369 mmol, 1 equiv.) in ethyl acetate (10 mL) was added 10% Pd/C (0.15 g, 50% H₂O) at room temperature. The reaction mixture was warmed to room temperature and the reaction was monitored by LC-MS. The reaction was kept at room temperature overnight. The solids were filtered through Celite® and the solvent was removed by rotary evaporator. The product was directly used without further purification. LC-MS: [M+H]+ 655.31, found 655.87.

[chemical structure]

[0387] To a solution of compound 69 (100 mg, 0.152 mmol, 1 equiv.) and azido-PEG₅-OTs (128 mg, 0.305 mmol, 2 equiv.) in anhydrous DMF (2 mL) was added K₂CO₃ (42 mg, 0.305 mmol, 2 equiv.) at 0° C. The reaction mixture was stirred for 6 hours at 80° C. The reaction was quenched by saturated NaHCO₃ solution and the aqueous layer was extracted with ethyl acetate (3×10 mL). The organic phase was combined, dried over Na₂SO₄, and concentrated. LC-MS: calculated [M+H]+ 900.40, found 901.46.

[chemical structure]

[0388] To a solution of compound 72 (59 mg, 0.0656 mmol, 1.0 equiv.) in THF (2 mL) and water (2 mL) was added lithium hydroxide (5 mg, 0.197 mmol, 3.0 equiv.) at room temperature. The mixture was stirred at room temperature for another 1 hr. The pH was adjusted to 3.0 by HCl (6N) and the aqueous phase was extracted with EtOAc (3×10 mL). The organic phase was combined, dried over Na₂SO₄, and concentrated. TFA (0.5 mL) and DCM (0.5 mL) was added into the residue and the mixture was stirred at room temperature for another 3 hr. The solvent was removed by rotary evaporator. LC-MS: calculated [M+H]+ 786.37, found 786.95.

### G. Synthesis of TriAlk 14

[0389] TriAlk14 and (TriAlk14)s as shown in Table 11, above, may be synthesized using the synthetic route shown below. Compound 14 may be added to the sense strand as a phosphoramidite using standard oligonucleotide synthesis techniques, or compound 22 may be conjugated to the sense strand comprising an amine in an amide coupling reaction.

[chemical structure]

[0390] To a 3-L jacketed reactor was added 500 mL DCM and 4 (75.0 g, 0.16 mol). The internal temperature of the reaction was cooled to 0° C. and TBTU (170.0 g, 0.53 mol) was added. The suspension was then treated with the amine 5 (75.5 g, 0.53 mol) dropwise keeping the internal temperature less than 5° C. The reaction was then treated with DIPEA (72.3 g, 0.56 mol) slowly, keeping the internal temperature less than 5° C. After the addition was complete, the reaction was warmed up to 23° C. over 1 hour, and allowed to stir for 3 hours. A 10% kicker charge of all three reagents were added and allowed to stir an additional 3 hours. The reaction was deemed complete when <1% of 4 remained. The reaction mixture was washed with saturated ammonium chloride solution (2×500 mL) and once with saturated sodium bicarbonate solution (500 mL). The organic layer was then dried over sodium sulfate and concentrated to an oil. The mass of the crude oil was 188 g which contained 72% 6 by QNMR. The crude oil was carried to the next step. Calculated mass for C₄₆H₆₀N₄O₁₁=845.0 m/z. Found [M+H]=846.0.

[chemical structure]

[0391] The 121.2 g of crude oil containing 72 wt % compound 6 (86.0 g, 0.10 mol) was dissolved in DMF (344 mL) and treated with TEA (86 mL, 20 v/v %), keeping the internal temperature below 23° C. The formation of dibenzofulvene (DBF) relative to the consumption of Fmoc-amine 6 was monitored via HPLC method 1 (FIG. 2) and the reaction was complete within 10 hours. To the solution was added glutaric anhydride (12.8 g, 0.11 mol) and the intermediate amine 7 was converted to compound 8 within 2 hours. Upon completion, the DMF and TEA were removed at 30° C. under reduced pressure resulting in 100 g of a crude oil. Due to the high solubility of compound 7 in water, an aqueous workup could not be used, and chromatography is the only way to remove DBF, TMU, and glutaric anhydride. The crude oil (75 g) was purified on a Teledyne ISCO Combi-Flash® purification system in three portions. The crude oil (25 g) was loaded onto a 330 g silica column and eluted from 0-20% methanol/DCM over 30 minutes resulting in 42 g of compound 8 (54% yield over 3 steps). Calculated mass for C₃₆H₅₅N₄O₁₂=736.4 m/z. Found [M+H]=737.0.

[chemical structure]

[0392] Compound 8 (42.0 g, 0.057 mol) was co-stripped with 10 volumes of acetonitrile prior to use to remove any residual methanol from chromatography solvents. The oil was redissolved in DMF (210 mL) and cooled to 0° C. The solution was treated with 4-nitrophenol (8.7 g, 0.063 moL) followed by EDC-hydrochloride (12.0 g, 0.063 mol) and found to reach completion within 10 hours. The solution was cooled to 0° C. and 10 volumes ethyl acetate was added followed by 10 volumes saturated ammonium chloride solution, keeping the internal temperature below 15° C. The layers were allowed to separate and the ethyl acetate layer was washed with brine. The combined aqueous layers were extracted twice with 5 volumes ethyl acetate. The combined organic layers were dried over sodium sulfate and concentrated to an oil. The crude oil (55 g) was purified on a Teledyne ISCO Combi-Flash® purification system in three portions. The crude oil (25 g) was loaded onto a 330 g silica column and eluted from 0-10% methanol/DCM over 30 minutes resulting in 22 g of pure 9 (Compound 22) (50% yield). Calculated mass for C₄₂H₅₉N₅O₁₄=857.4 m/z. Found [M+H]=858.0.

[chemical structure]

[0393] A solution of ester 9 (49.0 g, 57.1 mmol) and 6-amino-1-hexanol (7.36 g, 6.28 mmol) in dichloromethane (3 volumes) was treated with triethylamine (11.56 g, 111.4 mmol) dropwise. The reaction was monitored by observing the disappearance of compound 9 on HPLC Method 1 and was found to be complete in 10 minutes. The crude reaction mixture was diluted with 5 volumes dichloromethane and washed with saturated ammonium chloride (5 volumes) and brine (5 volumes). The organic layer was dried over sodium sulfate and concentrated to an oil. The crude oil was purified on a Teledyne ISCO Combi-Flash® purification system using a 330 g silica column. The 4-nitrophenol was eluted with 100% ethyl acetate and 10 was flushed from the column using 20% methanol/DCM resulting in a colorless oil (39 g, 81% yield). Calculated mass for C₄₂H₆₉N₅O₁₂=836.0 m/z. Found [M+H]=837.0.

[chemical structure]

[0394] Alcohol 10 was co-stripped twice with 10 volumes of acetonitrile to remove any residual methanol from chromatography solvents and once more with dry dichloromethane (KF <60 ppm) to remove trace water. The alcohol 10 (2.30 g, 2.8 mmol) was dissolved in 5 volumes dry dichloromethane (KF<50 ppm) and treated with diisopropylammonium tetrazolide (188 mg, 1.1 mmol). The solution was cooled to 0° C. and treated with 2-cyanoethyl N,N,N′,N′-tetraisopropylphosphoramidite (1.00 g, 3.3 mmol) dropwise. The solution was removed from ice-bath and stirred at 20° C. The reaction was found to be complete within 3-6 hours. The reaction mixture was cooled to 0° C. and treated with 10 volumes of a 1:1 solution of saturated ammonium bicarbonate/brine and then warmed to ambient over 1 minute and allowed to stir an additional 3 minutes at 20° C. The biphasic mixture was transferred to a separatory funnel and 10 volumes of dichloromethane was added. The organic layer was separated and washed with 10 volumes of saturated sodium bicarbonate solution to hydrolyze unreacted bis-phosphorous reagent. The organic layer was dried over sodium sulfate and concentrated to an oil resulting in 3.08 g of 94 wt % Compound 14. Calculated mass for C₅₁H₈₆N₇O₁₃P=1035.6 m/z. Found [M+H]=1036.

### H. Conjugation of Targeting Ligands

[0395] Either prior to or after annealing, the 5′ or 3′ tridentate alkyne functionalized sense strand is conjugated to targeting ligands. The following example describes the conjugation of targeting ligands to the annealed duplex: Stock solutions of 0.5M Tris(3-hydroxypropyltriazolylmethyl)amine (THPTA), 0.5M of Cu(II) sulfate pentahydrate (Cu(II)SO₄·5H₂O) and 2M solution of sodium ascorbate were prepared in deionized water. A 75 mg/mL solution in DMSO of targeting ligand was made. In a 1.5 mL centrifuge tube containing tri-alkyne functionalized duplex (3 mg, 75 μL, 40 mg/mL in deionized water, ˜15,000 g/mol), 25 μL of 1M Hepes pH 8.5 buffer is added. After vortexing, 35 μL of DMSO was added and the solution is vortexed. Targeting ligand was added to the reaction (6 equivalents/duplex, 2 equivalents/alkyne, ˜15 μL) and the solution is vortexed. Using pH paper, pH was checked and confirmed to be pH ˜8. In a separate 1.5 mL centrifuge tube, 50 μL of 0.5M THPTA was mixed with 10 uL of 0.5M Cu(II)SO₄·5H₂O, vortexed, and incubated at room temp for 5 min. After 5 min, THPTA/Cu solution (7.2 μL, 6 equivalents 5:1 THPTA:Cu) was added to the reaction vial, and vortexed. Immediately afterwards, 2M ascorbate (5 μL, 50 equivalents per duplex, 16.7 per alkyne) was added to the reaction vial and vortexed. Once the reaction was complete (typically complete in 0.5-1 h), the reaction was immediately purified by non-denaturing anion exchange chromatography.

### Example 2. Influenza A/Puerto Rico/8/34 PR8 Mouse Model

[0396] To study the effects of the IAV RNAi agents, the Influenza A/Puerto Rico/8/34 PR8 mouse model (“PR8 mouse model”) was established. The influenza A/Puerto Rico/8/34 (PR8) strain is a Biosafety Level 2 (BSL2) level virus that has been widely used in the laboratory as a mouse influenza model for studying acute lung injury/inflammation. PR8 has been previously shown to cause severe pathogenicity in mice (CF Basler, et al., Sequence of the 1918 pandemic influenza virus nonstructural gene (NS) segment and characterization of recombinant viruses bearing the 1918 NS genes. Proc Natl Acad Sci USA 98, 2746-2751 (2001)). PR8 has had over 100 passages in each of mice, ferrets, and embryonated chicken eggs, resulting in complete attenuation of the virus and its inability to replicate in humans (Annex 5, WHO Technical Report Series No 941, 2007).

[0397] C57BL/6 mice were infected with PR8, and the PR8-infected mice were subsequently administered IAV RNAi agents. C57BL/6 mice were also first administered IAV RNAi agents, and then subsequently infected with PR8. The optimal sub-lethal dose of PR8 infection was determined upon examination of the body weight loss after PR8 infection. If animal weight loss exceeded 20% of the pre-dose body weight, the viral dose was determined to be lethal and not optimal. Accordingly, the dose of the PR8 was subsequently adjusted for optimal sub-lethal dose.

### Example 3. Influenza A/California/07/2009 H1N1 Mouse Model

[0398] To study the effects of the IAV RNAi agents, the Influenza A/California/07/2009 H1N1 mouse model (“CA07 H1N1 mouse model”) was established. The influenza A/California/07/2009 (H1N1) (hereinafter “CA07 H1N1”) strain is a Biosafety Level 2 (BSL2) level virus, and has emerged with rapid human-to-human spread and caused the first pandemic of the 21st century. Rockman S, Laurie K, Barr I. Pandemic Influenza Vaccines: What did We Learn from the 2009 Pandemic and are We Better Prepared Now? Vaccines (Basel). 2020 May 7; 8(2):211. doi: 10.3390/vaccines8020211. PMID: 32392812; PMCID: PMC7349738. This virus replaced the previous A(H1N1), and continues to circulate today as a seasonal virus.

[0399] C57BL/6 mice were infected with CA07 H1N1, and the CA07 H1N1-infected mice were subsequently administered IAV RNAi agents. C57BL/6 mice were also first administered IAV RNAi agents, and then subsequently infected with CA07 H1N1. The optimal sub-lethal dose of CA07 H1N1 infection was determined upon examination of the body weight loss after CA07 H1N1 infection. If animal weight loss exceeded 20% of the pre-dose body weight, the viral dose was determined to be lethal and not optimal. Accordingly, the dose of the CA07 H1N1 was subsequently adjusted for optimal sub-lethal dose.

### Example 4. In Vivo Administration of IAV RNAi Agents to Mice Subsequently Infected with PR8

[0400] Female C57Bl/6 mice animals were dosed with IAV RNAi agents and subsequently infected with PR8, in accordance with Example 3 (“PR8 model mice”). On Days 1 and 3, four (n=4) mice (for Group 1) and six (n=6) mice (for Groups 2-6) were dosed with either saline or IAV RNAi agent formulated in saline (at 3 mg/kg), via intratracheal (IT) administration. On Day 8, the animals were dosed with either PBS or PR8 (BEI) formulated in PBS, via intranasal (IN) injection. Dosing was in accordance with Table 12 below.

TABLE 12
Dosing for mice animals of Example 4

| Group | Dose (RNAi Agent) | Dose (PR8) |
|---|---|---|
| 1 | Day 1 and 3: IT 50 μL Saline | Day 8: IN 100 μL PBS |
| 2 | Day 1 and 3: IT 50 μL Saline | Day 8: IN 100 μL PR8 |
| | | (938EID50) |
| 3 | Day 1 and 3: IT 50 μL 3 mg/kg | Day 8: IN 100 μL PR8 |
| | AC002564 | (938EID50) |
| 4 | Day 1 and 3: IT 50 μL 3 mg/kg | Day 8: IN 100 μL PR8 |
| | AC002567 | (938EID50) |
| 5 | Day 1 and 3: IT 50 μL 3 mg/kg | Day 8: IN 100 μL PR8 |
| | AC002568 | (938EID50) |
| 6 | Day 1 and 3: IT 50 μL 3 mg/kg | Day 8: IN 100 μL PR8 |
| | AC002569 | (938EID50) |

[0401] PR8 dose was quantified in EID50 (50% egg infective dose). This EID50 dose was determined to be the optimal sub-lethal dose in accordance with the PR8 mouse model described in Example 2, above.

[0402] On Day 14, the animals were sacrificed. Bronchoalveolar lavage fluid (BALF) and lungs (both left and right) were collected and harvested. Expression of mouse H1N1 and M1 in right lung was determined using qPCR, with 18S rRNA as endogenous control gene, normalized to Group 2. Average H1N1 and M1 expression for each animal in lung tissue was normalized relative to Group 2 (no RNAi agent+PR8 infection). Results are shown in Table 13 below.

TABLE 13
Average relative expression of HIN1 and M1 in mice lung of Example 4.

| | Avg | | | | | |
|---|---|---|---|---|---|---|
| Group ID | H1N1 | Low | High | Avg M1 | Low | High |
| 1. Saline + PBS | N/A | N/A | N/A | N/A | N/A | N/A |
| 2. Saline + PR8 | 1.000 | 0.218 | 0.278 | 1.000 | 0.196 | 0.243 |
| 3. 3 mg/kg AC002564 + | 0.093 | 0.040 | 0.069 | 0.135 | 0.054 | 0.090 |
| PR8 | | | | | | |
| 4. 3 mg/kg AC002567 + | 0.861 | 0.269 | 0.391 | 1.267 | 0.435 | 0.663 |
| PR8 | | | | | | |
| 5. 3 mg/kg AC002568 + | 0.521 | 0.182 | 0.279 | 0.627 | 0.196 | 0.284 |
| PR8 | | | | | | |
| 6. 3 mg/kg AC002569 + | 0.379 | 0.092 | 0.121 | 0.431 | 0.087 | 0.110 |
| PR8 | | | | | | |

[0403] Groups 3, 5, and 6 showed reductions in H1N1, with Group 3 (AC02564) in particular showing approximately 90% inhibition (0.093) of H1N1. Similarly, Groups 3, 5, and 6 showed reductions in M1, again with Group 3 (AC02564) showing reductions of approximately 87% (0.135). As noted in Tables 8A, 8C, 8D, and 8E, above, The IAV RNAi agent of Group 3 (AC002564) targets the M1 vRNA segment of influenza A (Table 8A); the IAV RNAi agent of Group 4 (AC002567) targets the PB1 vRNA segment of influenza A (Table 8C); the IAV RNAi agent of Group 5 (AC002568) targets the PB2 vRNA segment of influenza A (Table 8D); and the IAV RNAi agent of Group 6 (AC002569) targets the NP vRNA segment of influenza A (Table 8E). While targeting any specific vRNA segment of the influenza A genome that is conserved across multiple viral genome variants could potentially provide for a therapeutic effect, targeting the M1 vRNA segment, such as the IAV RNAi agent of Group 3 (AC002564), is a particularly promising. M1 is the most abundant protein in the influenza viron and plays critical roles in many aspects of the virus life cycle, including Influenza A viral ribonucleoprotein (vRNP) transport between the cytoplasm and the nucleus; regulation of vRNP transcription and replication; interaction with viral envelope proteins; and recruitment of viral and host components at the assembly site and initiation of budding. Mutations are extremely rare in M1. For at least these reasons, M1 is highly conserved and while it is generally regarded as the most optimal vRNA segment target for a broad-spectrum influenza A vaccine, there is no vaccine available yet targeting M1. Further while some attempts have been undertaken to develop small molecules targeting M1, none have been successful to date.

[0404] FIG. 2 shows the immunohistochemistry (IHC) of mouse PR8-infected (or non-infected PBS) lungs at 6 days post-infection, or Day 14. The mouse lung tissues were stained for anti-hemagglutinin (anti-HA) influenza A virus H1N1 IgG in accordance with manufacturer's instructions; the anti-HA immunogen is of recombinant protein encompassing a sequence within the C-terminus region of Influenza A virus H1N1 HA (Hemagglutinin) (A/WSN/1933(H1N1)) (GeneTex, Catalog #: GTX127357). As shown in FIG. 2, at Day 14 (6 days post-PR8 infection), RNAi agent AC002564 showed significantly reduced influenza A viral replication, as evidenced by the reduced anti-HA staining of the mice administered with AC002564+PR8 in comparison with the mice administered with saline (no IAV RNAi agent)+PR8, which is consistent the reductions reported above in Table 13.

### Example 5. In Vivo Administration of IAV RNAi Agents to Mice Subsequently Infected with PR8

[0405] Female C57Bl/6 mice animals were dosed with IAV RNAi agents and subsequently infected with PR8, in accordance with Example 3 (“PR8 model mice”). On Days 1 and 3, four (n=4) mice (for Group 1) and six (n=6) mice (for Groups 2-6) were dosed with either saline or IAV RNAi agent formulated in saline (at 3 mg/kg), via intratracheal (IT) administration. On Day 7, the animals were dosed with either PBS or PR8 (BEI) formulated in PBS, via intranasal (IN) injection. Dosing was in accordance with Table 14 below.

TABLE 14
Dosing for mice animals of Example 5

| Group | Dose (RNAi Agent) | Dose (PR8) |
|---|---|---|
| 1 | Day 1 and 3: IT 50 μL Saline | Day 7: IN 100 μL PBS |
| 2 | Day 1 and 3: IT 50 μL Saline | Day 7: IN 100 μL PR8 |
| | | (938EID50) |
| 3 | Day 1 and 3: IT 50 μL 3 mg/kg | Day 7: IN 100 μL PR8 |
| | AC002322 | (938EID50) |
| 4 | Day 1 and 3: IT 50 μL 3 mg/kg | Day 7: IN 100 μL PR8 |
| | AC002317 | (938EID50) |
| 5 | Day 1 and 3: IT 50 μL 3 mg/kg | Day 7: IN 100 μL PR8 |
| | AC002565 | (938EID50) |
| 6 | Day 1 and 3: IT 50 μL 3 mg/kg | Day 7: IN 100 μL PR8 |
| | AC002566 | (938EID50) |

[0406] PR8 dose was quantified in EID50 (50% egg infective dose). This EID50 dose was determined to be the optimal sub-lethal dose in accordance with the PR8 mouse model described in Example 2, above.

[0407] On Day 14, the animals were sacrificed. Lungs (both left and right) were collected and harvested. Expression of mouse H1N1 in right lung was determined using qPCR, with 18S rRNA as endogenous control gene. Average H1N1 expression for each animal in lung tissue was normalized relative to Group 2 (no RNAi agent+PR8 infection). Results are shown in Table 15 below.

TABLE 15
Average relative expression of H1N1 in mice lung of Example 5.

| Group ID | Avg H1N1 | High | Low |
|---|---|---|---|
| 1. Saline + PBS | N/A | N/A | N/A |
| 2. Saline + PR8 | 1.000 | 0.208 | 0.262 |
| 3. 3 mg/kg AC002322 + PR8 | 1.103 | 0.277 | 0.370 |
| 4. 3 mg/kg AC002317 + PR8 | 1.049 | 0.195 | 0.239 |
| 5. 3 mg/kg AC002565 + PR8 | 1.044 | 0.296 | 0.413 |
| 6. 3 mg/kg AC002566 + PR8 | 1.130 | 0.245 | 0.312 |

[0408] No reductions in H1N1 were seen in this Example.

### Example 6. In Vivo Administration of IAV RNAi Agents to Mice Subsequently Infected with PR8

[0409] Female C57Bl/6 mice animals were dosed with IAV RNAi agents and subsequently infected with PR8, in accordance with Example 3 (“PR8 model mice”). On Days 1 and 3, four (n=4) mice (for Group 1) and six (n=6) mice (for Groups 2-6) were dosed with either saline or IAV RNAi agent formulated in saline (at 3 mg/kg), via intratracheal (IT) administration. On Day 15, the animals were dosed with either PBS or PR8 (BEI) formulated in PBS, via intranasal (IN) injection. Dosing was in accordance with Table 16 below.

TABLE 16
Dosing for mice animals of Example 6.

| Group | Dose (RNAi Agent) | Dose (PR8) |
|---|---|---|
| 1 | Day 1 and 3: IT 50 μL Saline | Day 15: IN 100 μL PBS |
| 2 | Day 1 and 3: IT 50 μL Saline | Day 15: IN 100 μL PR8 |
| | | (938EID50) |
| 3 | Day 1 and 3: IT 50 μL 3 mg/kg | Day 15: IN 100 μL PR8 |
| | AC002322 | (938EID50) |
| 4 | Day 1 and 3: IT 50 μL 3 mg/kg | Day 15: IN 100 μL PR8 |
| | AC002317 | (938EID50) |
| 5 | Day 1 and 3: IT 50 μL 3 mg/kg | Day 15: IN 100 μL PR8 |
| | AC002565 | (938EID50) |
| 6 | Day 1 and 3: IT 50 μL 3 mg/kg | Day 15: IN 100 μL PR8 |
| | AC002566 | (938EID50) |

[0410] PR8 dose was quantified in EID50 (50% egg infective dose). This EID50 dose was determined to be the optimal sub-lethal dose in accordance with the PR8 mouse model described in Example 2, above.

[0411] On Day 18, the animals were sacrificed. Lungs (both left and right) were collected and harvested. Expression of mouse H1N1 in lung was determined using qPCR, with B2M as endogenous control gene. Average H1N1 expression for each animal in lung tissue was normalized relative to Group 2 (no RNAi agent+PR8 infection). Results are shown in Table 17 below.

TABLE 17
Average relative expression of H1N1 in mice lung of Example 6.

| | Avg | Std Dev |
|---|---|---|
| Group ID | H1N1 | (+/−) |
| 1. Saline + PBS | N/A | N/A |
| 2. Saline + PR8 | 1.020 | 0.221 |
| 3. 3 mg/kg AC002322 + PR8 | 0.714 | 0.273 |
| 4. 3 mg/kg AC002317 + PR8 | 1.158 | 0.650 |
| 5. 3 mg/kg AC002565 + PR8 | 0.679 | 0.404 |
| 6. 3 mg/kg AC002566 + PR8 | 0.866 | 0.435 |

[0412] Only very limited reductions in H1N1, if any (i.e., Group 4), were seen in this Example.

### Example 7. In Vivo Administration of IAV RNAi Agents to Mice Subsequently Infected with PR8

[0413] Female C57Bl/6 mice animals were dosed with IAV RNAi agents and subsequently infected with PR8, in accordance with Example 3 (“PR8 model mice”). On Days 1 and 3, four (n=4) mice (for Group 1) and six (n=6) mice (for Groups 2-5) were dosed with either saline or IAV RNAi agent formulated in saline (at 3 mg/kg), via intratracheal (IT) administration. On Day 8, the animals were dosed with either PBS or PR8 (BEI) formulated in PBS, via intranasal (IN) injection. Dosing was in accordance with Table 18 below.

TABLE 18
Dosing for mice animals of Example 7.

| Group | Dose (RNAi Agent) | Dose (PR8) |
|---|---|---|
| 1 | Day 1 and 3: IT 50 μL Saline | Day 8: IN 100 μL PBS |
| 2 | Day 1 and 3: IT 50 μL Saline | Day 8: IN 100 μL PR8 |
| | | (938EID50) |
| 3 | Day 1 and 3: IT 50 μL 3 mg/kg | Day 8: IN 100 μL PR8 |
| | AC002564 | (938EID50) |
| 4 | Day 1 and 3: IT 50 μL 3 mg/kg | Day 8: IN 100 μL PR8 |
| | AC002567 | (938EID50) |
| 5 | Day 1 and 3: IT 50 μL 3 mg/kg | Day 8: IN 100 μL PR8 |
| | AC002568 | (938EID50) |

[0414] PR8 dose was quantified in EID50 (50% egg infective dose). This EID50 dose was determined to be the optimal sub-lethal dose in accordance with the PR8 mouse model described in Example 2, above.

[0415] On Day 13, the animals were sacrificed. Lungs (both left and right) were collected and harvested. Expression of mouse H1N1 and M1 in lung was determined using qPCR, with B2M as endogenous control gene. Average H1N1 and M1 expression for each animal in lung tissue was normalized relative to Group 2 (no RNAi agent+PR8 infection). Results are shown in Table 19 below.

TABLE 19
Average relative expression of HIN1 and M1 in mice lung of Example 7.

| | Avg | | | | | |
|---|---|---|---|---|---|---|
| Group ID | H1N1 | Low | High | Avg M1 | Low | High |
| 1. Saline + PBS | N/A | N/A | N/A | N/A | N/A | N/A |
| 2. Saline + PR8 | 1.000 | 0.341 | 0.517 | 1.000 | 0.334 | 0.502 |
| 3. 3 mg/kg AC002564 + | 0.041 | 0.024 | 0.055 | 0.054 | 0.031 | 0.070 |
| PR8 | | | | | | |
| 4. 3 mg/kg AC002567 + | 0.930 | 0.240 | 0.104 | 1.161 | 0.401 | 0.245 |
| PR8 | | | | | | |
| 5. 3 mg/kg AC002568 + | 0.496 | 0.130 | 0.177 | 0.615 | 0.210 | 0.320 |
| PR8 | | | | | | |

[0416] Groups 3 and 5 showed reductions in H1N1, with Group 3 in particular (AC002564) showing reductions of nearly 96% (0.041) in H1N1. Groups 3 and 5 similarly showed reductions in M1, again with Group 3 (AC002564) showing reductions of approximately 95% (0.054) in M1.

### Example 8. In Vivo Administration of IAV RNAi Agents to Mice Subsequently Infected with PR8

[0417] Female C57Bl/6 mice animals were dosed with IAV RNAi agents and subsequently infected with PR8, in accordance with Example 3 (“PR8 model mice”). On Days 1 and 4, four (n=4) mice (for Group 1) and six (n=6) mice (for Groups 2-9) were dosed with either saline or IAV RNAi agent formulated in saline (at 3 mg/kg), via intratracheal (IT) administration. On Day 9, 16, 23, or 30, the animals were dosed with either PBS or PR8 (BEI) formulated in PBS, via intranasal (IN) injection. Dosing was in accordance with Table 20 below.

TABLE 20
Dosing for mice animals of Example 8.

| Group | Dose (RNAi Agent) | Dose (PR8) | Sacrifice |
|---|---|---|---|
| 1 | Day 1 and 4: IT 50 μL | Day 9: IN 100 μL PBS | Day 16 |
| | Saline | | |
| 2 | Day 1 and 4: IT 50 μL | Day 9: IN 100 μL PR8 | Day 16 |
| | Saline | (938EID50) | |
| 3 | Day 1 and 4: IT 50 μL | Day 16: IN 100 μL PR8 | Day 23 |
| | Saline | (938EID50) | |
| 4 | Day 1 and 4: IT 50 μL | Day 23: IN 100 μL PR8 | Day 30 |
| | Saline | (938EID50) | |
| 5 | Day 1 and 4: IT 50 μL | Day 30: IN 100 μL PR8 | Day 37 |
| | Saline | (938EID50) | |
| 6 | Day 1 and 4: IT 50 μL | Day 9: IN 100 μL PR8 | Day 16 |
| | 3 mg/kg AC002564 | (938EID50) | |
| 7 | Day 1 and 4: IT 50 μL | Day 16: IN 100 μL PR8 | Day 23 |
| | 3 mg/kg AC002564 | (938EID50) | |
| 8 | Day 1 and 4: IT 50 μL | Day 23: IN 100 μL PR8 | Day 30 |
| | 3 mg/kg AC002564 | (938EID50) | |
| 9 | Day 1 and 4: IT 50 μL | Day 30: IN 100 μL PR8 | Day 37 |
| | 3 mg/kg AC002564 | (938EID50) | |

[0418] PR8 dose was quantified in EID50 (50% egg infective dose). This EID50 dose was determined to be the optimal sub-lethal dose in accordance with the PR8 mouse model described in Example 2, above.

[0419] On Day 16, 23, 30, or 37, the animals were sacrificed, in accordance with Table 20 above. Bronchoalveolar lavage fluid (BALF) and lungs (both left and right) were collected and harvested. Expression of mouse H1N1 and M1 in lung was determined using qPCR, with B32M as endogenous control gene. Average H1N1 and M1 expression for each animal in lung tissue was normalized relative to Group 2 (no RNAi agent+Day 9 PR8 infection). Results are shown in Table 21 below.

TABLE 21
Average relative expression of H1N1 and M1 in mice lung of Example 7.

| | Avg | | | | | |
|---|---|---|---|---|---|---|
| Group ID | H1N1 | Low | High | Avg M1 | Low | High |
| 1. Saline + D9 PBS | N/A | N/A | N/A | N/A | N/A | N/A |
| 2. Saline + D9 PR8 | 1.000 | 0.140 | 0.163 | 1.000 | 0.137 | 0.159 |
| 3. Saline + D16 PR8 | 1.517 | 0.206 | 0.238 | 1.496 | 0.177 | 0.201 |
| 4. Saline + D23 PR8 | 1.605 | 0.361 | 0.466 | 1.631 | 0.291 | 0.354 |
| 5. Saline + D30 PR8 | 1.585 | 0.601 | 0.969 | 1.585 | 0.531 | 0.798 |
| 6. 3 mg/kg AC002564 + | 0.046 | 0.031 | 0.094 | 0.050 | 0.034 | 0.102 |
| D9 PR8 | | | | | | |
| 7. 3 mg/kg AC002564 + | 0.287 | 0.147 | 0.301 | 0.297 | 0.124 | 0.213 |
| D16 PR8 | | | | | | |
| 8. 3 mg/kg AC002564 − | 0.557 | 0.264 | 0.501 | 0.516 | 0.184 | 0.286 |
| D23 PR8 | | | | | | |
| 9. 3 mg/kg AC002564 − | 0.837 | 0.328 | 0.539 | 0.821 | 0.313 | 0.505 |
| D30 PR8 | | | | | | |

[0420] Reductions in H1N1 and M1 from the IAV RNAi agent AR002564 (Groups 6-9) showed that meaningful knockdown was sustained in this PR8 mouse model in this Example at least through Day 23.

### Example 9. In Vivo Administration of IAV RNAi Agents to Mice Subsequently Infected with PR8

[0421] Female C57Bl/6 mice animals were dosed with IAV RNAi agents and subsequently infected with PR8. On Days 1 and 4, four (n=4) mice (for Group 1) and six (n=6) mice (for Groups 2-7) were dosed with either saline or IAV RNAi agent formulated in saline (at 0.5 mg/kg, 1 mg/kg, 3 mg/kg), via intratracheal (IT) administration. On Day 8, the animals were dosed with either PBS or PR8 (BEI) formulated in PBS, via intranasal (IN) injection. Dosing was in accordance with Table 22 below.

TABLE 22
Dosing for mice animals of Example 9.

| Group | Dose (RNAi Agent) | Dose (PR8) | Sacrifice |
|---|---|---|---|
| 1 | Day 1 and 4: IT 50 μL | Day 8: IN 100 μL PBS | Day 14 |
| | Saline | | |
| 2 | Day 1 and 4: IT 50 μL | Day 8: IN 100 μL PR8 | Day 14 |
| | Saline | (938EID50) | |
| 3 | Day 1 and 4: IT 50 μL | Day 8: IN 100 μL PR8 | Day 21 |
| | Saline | (938EID50) | |
| 4 | Day 1 and 4: IT 50 μL | Day 8: IN 100 μL PR8 | Day 14 |
| | 3 mg/kg AC002564 | (938EID50) | |
| 5 | Day 1 and 4: IT 50 μL | Day 8: IN 100 μL PR8 | Day 14 |
| | 1.5 mg/kg AC002564 | (938EID50) | |
| 6 | Day 1 and 4: IT 50 μL | Day 8: IN 100 μL PR8 | Day 14 |
| | 0.5 mg/kg AC002564 | (938EID50) | |
| 7 | Day 1 and 4: IT 50 μL | Day 8: IN 100 μL PR8 | Day 21 |
| | 3 mg/kg AC002564 | (938EID50) | |

[0422] PR8 dose was quantified in EID50 (50% egg infective dose). This EID50 dose was determined to be the optimal sub-lethal dose in accordance with the PR8 mouse model described in Example 2, above.

[0423] On Day 14 or 21, the animals were sacrificed, in accordance with Table 22 above. Lungs (both left and right) were collected and harvested. Expression of mouse H1N1 and M1 in lung was determined using qPCR, with B2M as endogenous control gene. Average H1N1 and M1 expression for each animal in lung tissue was normalized relative to Group 2 (no RNAi agent+Day 8 PR8 infection). Results are shown in Table 23 below.

TABLE 23
Average relative expression of H1N1 and M1 in mice lung of Example 9.

| | Avg | | | Avg | | |
|---|---|---|---|---|---|---|
| Group ID | H1N1 | Low | High | M1 | Low | High |
| 1. Saline + D8 PBS | N/A | N/A | N/A | N/A | N/A | N/A |
| 2. Saline + D8 PR8, D14 Sac | 1.000 | 0.425 | 0.739 | 1.000 | 0.434 | 0.768 |
| 3. Saline + D8 PR8, D21 Sac | 0.000 | 0.000 | 0.000 | N/A | N/A | N/A |
| 4. 3 mg/kg AC002564 + PR8, | 0.137 | 0.068 | 0.136 | 0.132 | 0.066 | 0.133 |
| D14 Sac | | | | | | |
| 5. 1.5 mg/kg AC002564 + | 0.132 | 0.048 | 0.076 | 0.138 | 0.048 | 0.074 |
| PR8, D14 Sac | | | | | | |
| 6. 0.5 mg/kg AC002564 + | 0.260 | 0.106 | 0.180 | 0.255 | 0.103 | 0.173 |
| PR8, D14 Sac | | | | | | |
| 7. 3 mg/kg AC002564 + | N/A | N/A | N/A | N/A | N/A | N/A |
| PR8, D21 Sac | | | | | | |

[0424] Groups 4-6 showed reductions in H1N1 and M1 in PR8 mouse model through Day 14. Data was unavailable for mice animals sacrificed at Day 21 (Groups 3 and 7).

### Example 10. In Vivo Administration of IAV RNAi Agents to Mice Subsequently Infected with PR8

[0425] Female C57Bl/6 mice animals were dosed with IAV RNAi agents and subsequently infected with PR8, in accordance with Example 3 (“PR8 model mice”). On Days 1 and 3, four (n=4) mice (for Group 1) and six (n=6) mice (for Groups 2-3) were dosed with either saline or IAV RNAi agent formulated in saline (at 3 mg/kg), via intratracheal (IT) administration. On Day 8, the animals were dosed with either PBS or PR8 (BEI) formulated in PBS, via intranasal (IN) injection. Dosing was in accordance with Table 24 below.

TABLE 24
Dosing for mice animals of Example 10.

| Group | Dose (RNAi Agent) | Dose (PR8) |
|---|---|---|
| 1 | Day 1 and 3: IT 50 μL Saline | Day 8: IN 100 μL PBS |
| 2 | Day 1 and 3: IT 50 μL Saline | Day 8: IN 100 μL PR8 |
| | | (938EID50) |
| 3 | Day 1 and 3: IT 50 μL 3 mg/kg | Day 8: IN 100 μL PR8 |
| | AC002564 | (938EID50) |

[0426] PR8 dose was quantified in EID50 (50% egg infective dose). This EID50 dose was determined to be the optimal sub-lethal dose in accordance with the PR8 mouse model described in Example 2, above.

[0427] On Day 15, the animals were sacrificed. Lungs (both left and right) were collected and harvested. Expression of mouse H1N1 and M1 in lung was determined using qPCR, with 18s rRNA as endogenous control gene, normalized to Group 2. Average H1N1 and M1 expression for each animal in lung tissue was normalized relative to Group 2 (no RNAi agent+PR8 infection). Results are shown in Table 25 below.

TABLE 25
Average relative expression of H1N1 and M1 in mice lung of Example 10.

| | Avg | | | | | |
|---|---|---|---|---|---|---|
| Group ID | H1N1 | Low | High | Avg M1 | Low | High |
| 1. Saline + PBS | N/A | N/A | N/A | N/A | N/A | N/A |
| 2. Saline + PR8 | 1.000 | 0.329 | 0.490 | 1.000 | 0.333 | 0.498 |
| 3. 3 mg/kg AC002564 + | 0.094 | 0.079 | 0.490 | 0.088 | 0.073 | 0.437 |
| PR8 | | | | | | |

[0428] Group 3 showed reductions in H1N1 and in M1, of nearly 90-91% reductions (0.094, 0.088) in H1N1 and M1 at Day 15, with 2×3.0 mg/kg dose before PR8 viral challenge.

### Example 11. In Vivo Administration of IAV RNAi Agents to Mice Subsequently Infected with PR8

[0429] Female C57Bl/6 mice animals were dosed with IAV RNAi agents and subsequently infected with PR8, in accordance with Example 3 (“PR8 model mice”). On Days 1 and 3, four (n=4) mice (for Group 1) and six (n=6) mice (for Groups 2-3) were dosed with either saline or IAV RNAi agent formulated in saline (at 3 mg/kg), via intratracheal (IT) administration. On Day 7, the animals were dosed with either PBS or PR8 (BEI) formulated in PBS, via intranasal (IN) injection. Dosing was in accordance with Table 26 below.

TABLE 26
Dosing for mice animals of Example 11.

| Group | Dose (RNAi Agent) | Dose (PR8) |
|---|---|---|
| 1 | Day 1 and 3: IT 50 μL Saline | Day 7: IN 100 μL PBS |
| 2 | Day 1 and 3: IT 50 μL Saline | Day 7: IN 100 μL PR8 |
| | | (938EID50) |
| 3 | Day 1 and 3: IT 50 μL 3 mg/kg | Day 7: IN 100 μL PR8 |
| | AC002564 | (938EID50) |

[0430] PR8 dose was quantified in EID50 (50% egg infective dose). This EID50 dose was determined to be the optimal sub-lethal dose in accordance with the PR8 mouse model described in Example 2, above.

[0431] On Day 15, the animals were sacrificed. Lungs (both left and right) were collected and harvested. Expression of mouse H1N1 and M1 in lung was determined using qPCR, with 18s rRNA as endogenous control gene. Average H1N1 and M1 expression for each animal in lung tissue was normalized relative to Group 2 (no RNAi agent+PR8 infection). Results are shown in Table 27 below.

TABLE 27
Average relative expression of H1N1 and M1 in mice lung of Example 9.

| | Avg | | | Avg | | |
|---|---|---|---|---|---|---|
| Group ID | H1N1 | Low | High | M1 | Low | High |
| 1. Saline + PBS | N/A | N/A | N/A | N/A | N/A | N/A |
| 2. Saline + PR8 | 1.000 | 0.532 | 1.137 | 1.000 | 0.493 | 0.973 |
| 3. 3 mg/kg AC002564 + PR8 | 0.076 | 0.040 | 0.083 | 0.083 | 0.038 | 0.069 |

[0432] Group 3 showed reductions in H1N1 and in M1, of nearly 92-93% reductions (0.076, 0.083) in H1N1 and M1 at Day 15, with 2×3.0 mg/kg dose before PR8 viral challenge.

### Example 12. In Vivo Administration of IAV RNAi Agents to Mice Subsequently Infected with PR8

[0433] Female C57Bl/6 mice animals were dosed with IAV RNAi agents and subsequently infected with PR8, in accordance with Example 3 (“PR8 model mice”). On Days 1 and 3, four (n=4) mice (for Group 1) and five (n=5) mice (for Groups 2-8) were dosed with either saline or IAV RNAi agent formulated in saline (at 3 mg/kg), via intratracheal (IT) administration. On Day 8, the animals were dosed with either PBS or PR8 (BEI) formulated in PBS, via intranasal (IN) injection. Dosing was in accordance with Table 28 below.

TABLE 28
Dosing for mice animals of Example 12.

| Group | Dose (RNAi Agent) | Dose (PR8) |
|---|---|---|
| 1 | Day 1 and 3: IT 50 μL Saline | Day 8: IN 100 μL PBS |
| 2 | Day 1 and 3: IT 50 μL Saline | Day 8: IN 100 μL PR8 |
| | | (938EID50) |
| 3 | Day 1 and 3: IT 50 μL 3 mg/kg | Day 8: IN 100 μL PR8 |
| | AC002754 | (938EID50) |
| 4 | Day 1 and 3: IT 50 μL 3 mg/kg | Day 8: IN 100 μL PR8 |
| | AC002755 | (938EID50) |
| 5 | Day 1 and 3: IT 50 μL 3 mg/kg | Day 8: IN 100 μL PR8 |
| | AC002756 | (938EID50) |
| 6 | Day 1 and 3: IT 50 μL 3 mg/kg | Day 8: IN 100 μL PR8 |
| | AC002757 | (938EID50) |
| 7 | Day 1 and 3: IT 50 μL 3 mg/kg | Day 8: IN 100 μL PR8 |
| | AC002758 | (938EID50) |
| 8 | Day 1 and 3: IT 50 μL 3 mg/kg | Day 8: IN 100 μL PR8 |
| | AC002759 | (938EID50) |

[0434] PR8 dose was quantified in EID50 (50% egg infective dose). This EID50 dose was determined to be the optimal sub-lethal dose in accordance with the PR8 mouse model described in Example 2, above.

[0435] On Day 15, the animals were sacrificed. Lungs (both left and right) were collected and harvested. Expression of mouse H1N1 and M1 in lung was determined using PCR, with 18s rRNA as endogenous control gene. Average H1N1 and M1 expression for each animal in lung tissue was normalized relative to Group 2 (no RNAi agent+PR8 infection). Results are shown in Table 29 below.

TABLE 29
Average relative expression of H1N1 and M1 in mice lung of Example 12.

| | Avg | | | Avg | | |
|---|---|---|---|---|---|---|
| Group ID | H1N1 | Low | High | M1 | Low | High |
| 1. Saline + PBS | N/A | N/A | N/A | N/A | N/A | N/A |
| 2. Saline + PR8 | 1.000 | 0.229 | 0.298 | 1.000 | 0.195 | 0.242 |
| 3. 3 mg/kg AC002754 + PR8 | 0.987 | 0.595 | 1.500 | 0.841 | 0.364 | 0.643 |
| 4. 3 mg/kg AC002755 + PR8 | 0.516 | 0.082 | 0.098 | 0.592 | 0.109 | 0.133 |
| 5. 3 mg/kg AC002756 + PR8 | 0.393 | 0.069 | 0.084 | 0.423 | 0.070 | 0.084 |
| 6. 3 mg/kg AC002757 + PR8 | 0.938 | 0.145 | 0.171 | 0.843 | 0.104 | 0.118 |
| 7. 3 mg/kg AC002758 + PR8 | 0.888 | 0.185 | 0.234 | 0.875 | 0.156 | 0.190 |
| 8. 3 mg/kg AC002759 + PR8 | 1.135 | 0.390 | 0.595 | 0.892 | 0.193 | 0.246 |

[0436] Rather modest reductions in H1N1 and M1 were seen ins Groups 4 and 5, with effectively no reductions seen from the IAV RNAi agents in Groups 3, 6, 7, and 8.

### Example 13. In Vivo Administration of IAV RNAi Agents to Mice Subsequently Infected with PR8

[0437] Female C57Bl/6 mice animals were dosed with IAV RNAi agents and subsequently infected with PR8, in accordance with Example 3 (“PR8 model mice”). On Days 1 and 3, four (n=4) mice (for Group 1) and five (n=5) mice (for Groups 2-8) were dosed with either saline or IAV RNAi agent formulated in saline (at 3 mg/kg), via intratracheal (IT) administration. On Day 8, the animals were dosed with either PBS or PR8 (BEI) formulated in PBS, via intranasal (IN) injection. Dosing was in accordance with Table 30 below.

TABLE 30
Dosing for mice animals of Example 13.

| Group | Dose (RNAi Agent) | Dose (PR8) |
|---|---|---|
| 1 | Day 1 and 3: IT 50 μL Saline | Day 8: IN 100 μL PBS |
| 2 | Day 1 and 3: IT 50 μL Saline | Day 8: IN 100 μL PR8 |
| | | (938EID50) |
| 3 | Day 1 and 3: IT 50 μL 3 mg/kg | Day 8: IN 100 μL PR8 |
| | AC002760 | (938EID50) |
| 4 | Day 1 and 3: IT 50 μL 3 mg/kg | Day 8: IN 100 μL PR8 |
| | AC002761 | (938EID50) |
| 5 | Day 1 and 3: IT 50 μL 3 mg/kg | Day 8: IN 100 μL PR8 |
| | AC002762 | (938EID50) |
| 6 | Day 1 and 3: IT 50 μL 3 mg/kg | Day 8: IN 100 μL PR8 |
| | AC002763 | (938EID50) |
| 7 | Day 1 and 3: IT 50 μL 3 mg/kg | Day 8: IN 100 μL PR8 |
| | AC002764 | (938EID50) |
| 8 | Day 1 and 3: IT 50 μL 3 mg/kg | Day 8: IN 100 μL PR8 |
| | AC002765 | (938EID50) |

[0438] PR8 dose was quantified in EID50 (50% egg infective dose). This EID50 dose was determined to be the optimal sub-lethal dose in accordance with the PR8 mouse model described in Example 2, above.

[0439] On Day 14, the animals were sacrificed. Lungs (both left and right) were collected and harvested. Expression of mouse H1N1 and M1 in lung was determined using qPCR, with 18s rRNA as endogenous control gene. Average H1N1 and M1 expression for each animal in lung tissue was normalized relative to Group 2 (no RNAi agent+PR8 infection). Results are shown in Table 31 below.

TABLE 31
Average relative expression of H1N1
and M1 in mice lung of Example 13.

| | Avg | | | Avg | | |
|---|---|---|---|---|---|---|
| Group ID | H1N1 | Low | High | M1 | Low | High |
| 1. Saline + PBS | N/A | N/A | N/A | N/A | N/A | N/A |
| 2. Saline + PR8 | 1.000 | 0.213 | 0.271 | 1.000 | 0.268 | 0.366 |
| 3. 3 mg/kg AC002760 + | 0.336 | 0.146 | 0.258 | 0.582 | 0.239 | 0.404 |
| PR8 | | | | | | |
| 4. 3 mg/kg AC002761 + | 0.334 | 0.128 | 0.208 | 0.574 | 0.207 | 0.323 |
| PR8 | | | | | | |
| 5. 3 mg/kg AC002762 + | 0.679 | 0.221 | 0.328 | 0.923 | 0.269 | 0.380 |
| PR8 | | | | | | |
| 6. 3 mg/kg AC002763 + | 0.665 | 0.096 | 0.112 | 0.907 | 0.226 | 0.300 |
| PR8 | | | | | | |
| 7. 3 mg/kg AC002764 + | 0.397 | 0.133 | 0.200 | 0.471 | 0.179 | 0.288 |
| PR8 | | | | | | |
| 8. 3 mg/kg AC002765 + | 0.670 | 0.202 | 0.290 | 0.979 | 0.304 | 0.441 |
| PR8 | | | | | | |

[0440] Groups 3-8 showed only relatively modest reductions in H1N1 and M1.

### Example 14. In Vivo Administration of IAV RNAi Agents to Mice Subsequently Infected with PR8

[0441] Female C57Bl/6 mice animals were dosed with IAV RNAi agents and subsequently infected with PR8, in accordance with Example 3 (“PR8 model mice”). On Days 1 and 3, four (n=4) mice (for Group 1) and five (n=5) mice (for Groups 2-8) were dosed with either saline or IAV RNAi agent formulated in saline (at 3 mg/kg), via intratracheal (IT) administration. On Day 8, the animals were dosed with either PBS or PR8 (BEI) formulated in PBS, via intranasal (IN) injection. Dosing was in accordance with Table 32 below.

TABLE 32
Dosing for mice animals of Example 14.

| Group | Dose (RNAi Agent) | Dose (PR8) |
|---|---|---|
| 1 | Day 1 and 3: IT 50 μL Saline | Day 8: IN 100 μL PBS |
| 2 | Day 1 and 3: IT 50 μL Saline | Day 8: IN 100 μL PR8 |
| | | (938EID50) |
| 3 | Day 1 and 3: IT 50 μL 3 mg/kg | Day 8: IN 100 μL PR8 |
| | AC002766 | (938EID50) |
| 4 | Day 1 and 3: IT 50 μL 3 mg/kg | Day 8: IN 100 μL PR8 |
| | AC002767 | (938EID50) |
| 5 | Day 1 and 3: IT 50 μL 3 mg/kg | Day 8: IN 100 μL PR8 |
| | AC002768 | (938EID50) |
| 6 | Day 1 and 3: IT 50 μL 3 mg/kg | Day 8: IN 100 μL PR8 |
| | AC002769 | (938EID50) |
| 7 | Day 1 and 3: IT 50 μL 3 mg/kg | Day 8: IN 100 μL PR8 |
| | AC002770 | (938EID50) |
| 8 | Day 1 and 3: IT 50 μL 3 mg/kg | Day 8: IN 100 μL PR8 |
| | AC002771 | (938EID50) |

[0442] PR8 dose was quantified in EID50 (50% egg infective dose). This EID50 dose was determined to be the optimal sub-lethal dose in accordance with the PR8 mouse model described in Example 2, above.

[0443] On Day 15, the animals were sacrificed. Lungs (both left and right) were collected and harvested. Expression of mouse H1N1 and M1 in lung was determined using qPCR, with 18s rRNA as endogenous control gene. Average H1N1 and M1 expression for each animal in lung tissue was normalized relative to Group 2 (no RNAi agent+PR8 infection). Results are shown in Table 33 below.

TABLE 33
Average relative expression of H1N1 and M1 in mice lung
of Example 14.

| | Avg | | | Avg | | |
|---|---|---|---|---|---|---|
| Group ID | H1N1 | Low | High | M1 | Low | High |
| 1. Saline + PBS | N/A | N/A | N/A | N/A | N/A | N/A |
| 2. Saline + PR8 | 1.000 | 0.197 | 0.245 | 1.000 | 0.186 | 0.229 |
| 3. 3 mg/kg AC002766 + PR8 | 0.841 | 0.256 | 0.368 | 0.971 | 0.317 | 0.470 |
| 4. 3 mg/kg AC002767 + PR8 | 0.622 | 0.232 | 0.370 | 0.767 | 0.296 | 0.483 |
| 5. 3 mg/kg AC002768 + PR8 | 1.011 | 0.262 | 0.354 | 1.250 | 0.359 | 0.503 |
| 6. 3 mg/kg AC002769 + PR8 | 0.589 | 0.259 | 0.462 | 0.831 | 0.316 | 0.511 |
| 7. 3 mg/kg AC002770 + PR8 | 0.665 | 0.227 | 0.346 | 0.783 | 0.226 | 0.318 |
| 8. 3 mg/kg AC002771 + PR8 | 1.291 | 0.423 | 0.630 | 1.456 | 0.410 | 0.570 |

[0444] Groups 3, 4, 6, and 7 showed only relatively modest reductions in H1N1 and M1.

### Example 15. In Vivo Administration of IAV RNAi Agents to Mice Previously Infected with PR8

[0445] Female C57Bl/6 mice animals were infected with PR8, and subsequently dosed with IAV RNAi agents, in accordance with Example 3 (“PR8 model mice”). On Day 1, four (n=4) mice (for Group 1) and five (n=5) mice (for Groups 2-11) animals were dosed with either PBS or PR8 (BEI) formulated in PBS, via intranasal (IN) injection. On Day 5, the animals were dosed with either saline or IAV RNAi agent formulated in saline (at 3 mg/kg), via intratracheal (IT) administration. Dosing was in accordance with Table 34 below.

TABLE 34
Dosing for mice animals of Example 15.

| Group | Dose (RNAi Agent) | Dose (PR8) | Sacrifice |
|---|---|---|---|
| 1 | Day 5: IT 50 μL Saline | Day 1: IN 100 μL PBS | Day 10 |
| 2 | Day 5: IT 50 μL Saline | Day 1: IN 100 μL PR8 | Day 5, |
| | | (469 EID50) | 6 hours |
| | | | post PR8 |
| | | | infection |
| 3 | Day 5: IT 50 μL 3 mg/kg | Day 1: IN 100 μL PR8 | Day 5, |
| | AC002564 | (469 EID50) | 6 hours |
| | | | post PR8 |
| | | | infection |
| 4 | Day 5: IT 50 μL Saline | Day 1: IN 100 μL PR8 | Day 6 |
| | | (469 EID50) | |
| 5 | Day 5: IT 50 μL 3 mg/kg | Day 1: IN 100 μL PR8 | Day 6 |
| | AC002564 | (469 EID50) | |
| 6 | Day 5: IT 50 μL Saline | Day 1: IN 100 μL PR8 | Day 7 |
| | | (469 EID50) | |
| 7 | Day 5: IT 50 μL 3 mg/kg | Day 1: IN 100 μL PR8 | Day 7 |
| | AC002564 | (469 EID50) | |
| 8 | Day 5: IT 50 μL Saline | Day 1: IN 100 μL PR8 | Day 8 |
| | | (469 EID50) | |
| 9 | Day 5: IT 50 μL 3 mg/kg | Day 1: IN 100 μL PR8 | Day 8 |
| | AC002564 | (469 EID50) | |
| 10 | Day 5: IT 50 μL Saline | Day 1: IN 100 μL PR8 | Day 9 |
| | | (469 EID50) | |
| 11 | Day 5: IT 50 μL 3 mg/kg | Day 1: IN 100 μL PR8 | Day 9 |
| | AC002564 | (469 EID50) | |

[0446] PR8 dose was quantified in EID50 (50% egg infective dose). This EID50 dose was determined to be the optimal sub-lethal dose in accordance with the PR8 mouse model described in Example 2, above.

[0447] On Day 5, 6, 7, 8, 9, or 10, the animals were sacrificed, in accordance with Table 34 above. Lungs (both left and right) were collected and harvested. Expression of mouse H1N1 and M1 in lung was determined using qPCR, with 18s rRNA as endogenous control gene. Average H1N1 and M1 expression for each animal in lung tissue was normalized relative to each control group dosed with saline; Group 3 is normalized to Group 2, Group 5 is normalized to Group 4, Group 7 is normalized to Group 6, Group 9 is normalized to Group 8, and Group 11 is normalized to Group 10. Results are shown in Table 35 below.

TABLE 35
Average relative expression of H1N1 and M1 in mice lung of Example 15.

| | Avg | | | Avg | | |
|---|---|---|---|---|---|---|
| Group ID | H1N1 | Low | High | M1 | Low | High |
| 1. Saline + PBS, D10 Sac | N/A | N/A | N/A | N/A | N/A | N/A |
| 2. Saline + PR8, D5 Sac | 1.000 | 0.371 | 0.589 | 1.000 | 0.317 | 0.463 |
| 3. 3 mg/kg AC002564 + | 0.596 | 0.198 | 0.295 | 0.585 | 0.119 | 0.150 |
| PBS, D5 Sac | | | | | | |
| 4. Saline + PR8, D6 Sac | 1.000 | 0.172 | 0.208 | 1.000 | 0.175 | 0.212 |
| 5. 3 mg/kg AC002564 + | 0.611 | 0.236 | 0.384 | 0.507 | 0.086 | 0.103 |
| PR8, D6 Sac | | | | | | |
| 6. Saline + PR8, D7 Sac | 1.000 | 0.335 | 0.504 | 1.000 | 0.168 | 0.202 |
| 7. 3 mg/kg AC002564 + | 0.423 | 0.105 | 0.140 | 0.494 | 0.116 | 0.151 |
| PR8, D7 Sac | | | | | | |
| 8. Saline + PR8, D8 Sac | 1.000 | 0.207 | 0.262 | 1.000 | 0.122 | 0.139 |
| 9. 3 mg/kg AC002564 + | 0.236 | 0.075 | 0.109 | 0.317 | 0.081 | 0.109 |
| PR8, D8 Sac | | | | | | |
| 10. Saline + PR8, D9 Sac | 1.000 | 0.325 | 0.482 | 1.000 | 0.272 | 0.374 |
| 11. 3 mg/kg AC002564 + | 0.074 | 0.021 | 0.030 | 0.065 | 0.018 | 0.024 |
| PR8, D9 Sac | | | | | | |

[0448] Groups 3, 5, 7, 9, and 11 showed reduction in H1N1 and M1. Specifically, Group 11 showed ˜92% reduction (0.074) of H1N1 and 93% reduction (0.065) of M1 at Day 9.

### Example 16. In Vivo Administration of IAV RNAi Agents to Mice Subsequently Infected with CA07 H1N1

[0449] Female C57Bl/6 mice animals were dosed with IAV RNAi agents and subsequently infected with CA07, in accordance with Example 4 (“CA07 H1N1 model mice”). On Days 1 and 3, four (n=4) mice (for Group 1) and five (n=5) mice (for Groups 2-8) were dosed with either saline or IAV RNAi agent formulated in saline (at 3 mg/kg), via intratracheal (IT) administration. On Day 8, the animals were dosed with either PBS or CA07 H1N1 formulated in PBS, via intranasal (N) injection. Dosing was in accordance with Table 36 below.

TABLE 36
Dosing for mice animals of Example 16.

| Group | Dose (RNAi Agent) | Dose (CA07) |
|---|---|---|
| 1 | Day 1 and 3: IT 50 μL Saline | Day 8: IN 100 μL PBS |
| 2 | Day 1 and 3: IT 50 μL Saline | Day 8: IN 100 μL CA07 |
| | | (4240 TCID50) |
| 3 | Day 1 and 3: IT 50 μL 3 mg/kg | Day 8: IN 100 μL CA07 |
| | AC002564 | (4240 TCID50) |
| 4 | Day 1 and 3: IT 50 μL 3 mg/kg | Day 8: IN 100 μL CA07 |
| | AC002865 | (4240 TCID50) |
| 5 | Day 1 and 3: IT 50 μL 3 mg/kg | Day 8: IN 100 μL CA07 |
| | AC002866 | (4240 TCID50) |
| 6 | Day 1 and 3: IT 50 μL 3 mg/kg | Day 8: IN 100 μL CA07 |
| | AC002869 | (4240 TCID50) |
| 7 | Day 1 and 3: IT 50 μL 3 mg/kg | Day 8: IN 100 μL CA07 |
| | AC002870 | (4240 TCID50) |
| 8 | Day 1 and 3: IT 50 μL 3 mg/kg | Day 8: IN 100 μL CA07 |
| | AC002872 | (4240 TCID50) |

[0450] CA07 dose was quantified in TCID50 (50% tissue culture infective dose). This TCID50 dose was determined to be the optimal sub-lethal dose in accordance with the CA07 mouse model described in Example 3, above.

[0451] On Day 14, the animals were sacrificed. Lungs (both left and right) were collected and harvested. Expression of mouse H1N1 and M1 in lung was determined using qPCR, with 18s rRNA as endogenous control gene. Average H1N1 and M1 expression for each animal in lung tissue was normalized relative to Group 2 (no RNAi agent+CA07 infection). Results are shown in Table 37 below.

TABLE 37
Average relative expression of HIN1 and M1 in mice lung of Example 16.

| | Avg | | | Avg | | |
|---|---|---|---|---|---|---|
| Group ID | H1N1 | Low | High | M1 | Low | High |
| 1. Saline + PBS | N/A | N/A | N/A | N/A | N/A | N/A |
| 2. Saline + CA07 | 1.000 | 0.223 | 0.286 | 1.000 | 0.225 | 0.290 |
| 3. 3 mg/kg AC002564 + CA07 | 0.192 | 0.084 | 0.151 | 0.309 | 0.146 | 0.277 |
| 4. 3 mg/kg AC002865 + CA07 | 0.320 | 0.140 | 0.248 | 0.471 | 0.161 | 0.245 |
| 5. 3 mg/kg AC002866 + CA07 | 0.169 | 0.055 | 0.082 | 0.241 | 0.068 | 0.094 |
| 6. 3 mg/kg AC002869 + CA07 | 0.109 | 0.055 | 0.113 | 0.158 | 0.077 | 0.151 |
| 7. 3 mg/kg AC002870 + CA07 | 0.232 | 0.093 | 0.155 | 0.304 | 0.119 | 0.194 |
| 8. 3 mg/kg AC002872 + CA07 | 0.230 | 0.035 | 0.042 | 0.324 | 0.044 | 0.050 |

[0452] Each of Groups 3-8 showed reductions in H1N1 and in M1.

### Example 17. In Vivo Administration of IAV RNAi Agents to Mice Subsequently Infected with CA07 H1N1

[0453] Female C57Bl/6 mice animals were dosed with IAV RNAi agents and subsequently infected with CA07, in accordance with Example 4 (“CA07 H1N1 model mice”). On Days 1 and 3, four (n=4) mice (for Group 1) and five (n=5) mice (for Groups 2-8) were dosed with either saline or IAV RNAi agent formulated in saline (at 3 mg/kg), via intratracheal (IT) administration. On Day 8, the animals were dosed with either PBS or CA07 H1N1 formulated in PBS, via intranasal (IN) injection. Dosing was in accordance with Table 38 below.

TABLE 38
Dosing for mice animals of Example 17.

| Group | Dose (RNAi Agent) | Dose (CA07) |
|---|---|---|
| 1 | Day 1 and 3: IT 50 μL Saline | Day 8: IN 100 μL PBS |
| 2 | Day 1 and 3: IT 50 μL Saline | Day 8: IN 100 μL CA07 |
| | | (4240 TCID50) |
| 3 | Day 1 and 3: IT 50 μL 3 mg/kg | Day 8: IN 100 μL CA07 |
| | AC002601 | (4240 TCID50) |
| 4 | Day 1 and 3: IT 50 μL 3 mg/kg | Day 8: IN 100 μL CA07 |
| | AC002929 | (4240 TCID50) |
| 5 | Day 1 and 3: IT 50 μL 3 mg/kg | Day 8: IN 100 μL CA07 |
| | AC002930 | (4240 TCID50) |
| 6 | Day 1 and 3: IT 50 μL 3 mg/kg | Day 8: IN 100 μL CA07 |
| | AC002932 | (4240 TCID50) |
| 7 | Day 1 and 3: IT 50 μL 3 mg/kg | Day 8: IN 100 μL CA07 |
| | AC002933 | (4240 TCID50) |
| 8 | Day 1 and 3: IT 50 μL 3 mg/kg | Day 8: IN 100 μL CA07 |
| | AC002927 | (4240 TCID50) |

[0454] CA07 dose was quantified in TCID50 (50% tissue culture infective dose). This TCID50 dose was determined to be the optimal sub-lethal dose in accordance with the CA07 mouse model described in Example 3, above.

[0455] On Day 14, the animals were sacrificed. Lungs (both left and right) were collected and harvested. Expression of mouse H1N1 and M1 in lung was determined using qPCR, with 18s rRNA as endogenous control gene. Average H1N1 and M1 expression for each animal in lung tissue was normalized relative to Group 2 (no RNAi agent+CA07 infection). Results are shown in Table 39 below.

TABLE 39
Average relative expression of H1N1 and M1 in mice lung of Example 17.

| | Avg | | | Avg | | |
|---|---|---|---|---|---|---|
| Group ID | H1N1 | Low | High | M1 | Low | High |
| 1. Saline + PBS | N/A | N/A | N/A | N/A | N/A | N/A |
| 2. Saline + CA07 | 1.000 | 0.330 | 0.493 | 1.000 | 0.334 | 0.501 |
| 3. 3 mg/kg AC002601 + CA07 | 0.196 | 0.090 | 0.166 | 0.250 | 0.121 | 0.235 |
| 4. 3 mg/kg AC002929 + CA07 | 0.113 | 0.061 | 0.134 | 0.132 | 0.072 | 0.157 |
| 5. 3 mg/kg AC002930 + CA07 | 0.096 | 0.036 | 0.058 | 0.121 | 0.039 | 0.057 |
| 6. 3 mg/kg AC002932 + CA07 | 0.096 | 0.038 | 0.064 | 0.131 | 0.045 | 0.069 |
| 7. 3 mg/kg AC002933 + CA07 | 0.129 | 0.080 | 0.209 | 0.169 | 0.097 | 0.226 |
| 8. 3 mg/kg AC002927 + CA07 | 0.083 | 0.031 | 0.049 | 0.111 | 0.047 | 0.081 |

[0456] Each of Groups 3-8 showed reductions in H1N1 and in M1.

### Example 18. In Vivo Administration of IAV RNAi Agents to Mice Subsequently Infected with CA07H1N1

[0457] Female C57Bl/6 mice animals were dosed with IAV RNAi agents and subsequently infected with CA07, in accordance with Example 4 (“CA07 H1N1 model mice”). On Days 1 and 3, four (n=4) mice (for Group 1) and five (n=5) mice (for Groups 2-8) were dosed with either saline or IAV RNAi agent formulated in saline (at 3 mg/kg), via intratracheal (IT) administration. On Day 8, the animals were infected with either PBS or 4240 TCID50 of CA07 H1N1 formulated in PBS, via intranasal (IN) injection. Dosing was in accordance with Table 40 below.

TABLE 40
Dosing for mice animals of Example 18.

| Group | Dose (RNAi Agent) | Dose (CA07) |
|---|---|---|
| 1 | Day 1: IT 50 μL Saline | Day 8: IN 100 μL PBS |
| | Day 3: IT 100 μL Saline | |
| 2 | Day 1: IT 50 μL Saline | Day 8: IN 100 μL CA07 |
| | Day 3: IT 100 μL Saline | (4240 TCID50) |
| 3 | Day 1: IT 50 μL 3 mg/kg | Day 8: IN 100 μL CA07 |
| | AC002601 | (4240 TCID50) |
| | Day 3: IT 100 μL 3 mg/kg | |
| | AC002601 | |
| 4 | Day 1: IT 50 μL 3 mg/kg | Day 8: IN 100 μL CA07 |
| | AC002686 | (4240 TCID50) |
| | Day 3: IT 100 μL 3 mg/kg | |
| | AC002686 | |
| 5 | Day 1: IT 50 μL 3 mg/kg | Day 8: IN 100 μL CA07 |
| | AC002685 | (4240 TCID50) |
| | Day 3: IT 100 μL 3 mg/kg | |
| | AC002685 | |
| 6 | Day 1: IT 50 μL 3 mg/kg | Day 8: IN 100 μL CA07 |
| | AC002905 | (4240 TCID50) |
| | Day 1: IT 100 μL 3 mg/kg | |
| | AC002905 | |
| 7 | Day 1: IT 50 μL 3 mg/kg | Day 8: IN 100 μL CA07 |
| | AC002906 | (4240 TCID50) |
| | Day 3: IT 100 μL 3 mg/kg | |
| | AC002906 | |
| 8 | Day 1: IT 50 μL 3 mg/kg | Day 8: IN 100 μL CA07 |
| | AC002907 | (4240 TCID50) |
| | Day 3: IT 100 μL 3 mg/kg | |
| | AC002907 | |

[0458] CA07 dose was quantified in TCID50 (50% tissue culture infective dose). This TCID50 dose was determined to be the optimal sub-lethal dose in accordance with the CA07 mouse model described in Example 3, above.

[0459] On Day 14, the animals were sacrificed. Lungs (both left and right) were collected and harvested. Expression of mouse H1N1 and M1 in lung was determined using qPCR, with 18s rRNA as endogenous control gene. Average H1N1 and M1 expression for each animal in lung tissue was normalized relative to Group 2 (no RNAi agent+CA07 infection). Results are shown in Table 41 below.

TABLE 41
Average relative expression of H1N1 and M1 in mice lung of Example 18.

| | Avg | | | Avg | | |
|---|---|---|---|---|---|---|
| Group ID | H1N1 | Low | High | M1 | Low | High |
| 1. Saline + PBS | N/A | N/A | N/A | N/A | N/A | N/A |
| 2. Saline + CA07 | 1.000 | 0.465 | 0.869 | 1.000 | 0.428 | 0.749 |
| 3. 3 mg/kg AC002601+ CA07 | 0.122 | 0.026 | 0.033 | 0.138 | 0.029 | 0.037 |
| 4. 3 mg/kg AC002686+ CA07 | 0.623 | 0.193 | 0.279 | 0.659 | 0.199 | 0.285 |
| 5. 3 mg/kg AC002685+ CA07 | 0.415 | 0.078 | 0.096 | 0.402 | 0.047 | 0.054 |
| 6. 3 mg/kg AC002905+ CA07 | 0.686 | 0.192 | 0.267 | 0.553 | 0.149 | 0.204 |
| 7. 3 mg/kg AC002906+ CA07 | 1.077 | 0.287 | 0.392 | 0.788 | 0.158 | 0.197 |
| 8. 3 mg/kg AC002907+ CA07 | 0.951 | 0.223 | 0.291 | 0.652 | 0.132 | 0.165 |

[0460] The IAV RNAi agent of Group 3 (AC002601) was particularly potent, showing reductions over greater than 86% in both H1N1 and M1, while the IAV RNAi agents of the remaining Groups (i.e., Groups 4-8) showed only modest or in some cases no inhibition of H1N1 and M1.

### Example 19. In Vivo Administration of IAV RNAi Agents to Mice Subsequently Infected with CA07 H1N1

[0461] Female C57Bl/6 mice animals were dosed with IAV RNAi agents and subsequently infected with CA07, in accordance with Example 4 (“CA07 H1N1 model mice”). On Days 1 and 3, four (n=4) mice (for Group 1) and five (n=5) mice (for Groups 2-8) were dosed with either saline or IAV RNAi agent formulated in saline (at 3 mg/kg), via intratracheal (IT) administration. On Day 8, the animals were dosed with either PBS or CA07 H1N1 formulated in PBS, via intranasal (IN) injection. Dosing was in accordance with Table 42 below.

TABLE 42
Dosing for mice animals of Example 19.

| Group | Dose (RNAi Agent) | Dose (CA07) |
|---|---|---|
| 1 | Day 1 and 3: IT 50 μL Saline | Day 8: IN 100 μL PBS |
| 2 | Day 1 and 3: IT 50 μL Saline | Day 8: IN 100 μL CA07 |
| | | (4240 TCID50) |
| 3 | Day 1 and 3: IT 50 μL 3 mg/kg | Day 8: IN 100 μL CA07 |
| | AC002564 | (4240 TCID50) |
| 4 | Day 1 and 3: IT 50 μL 3 mg/kg | Day 8: IN 100 μL CA07 |
| | AC002569 | (4240 TCID50) |
| 5 | Day 1 and 3: IT 50 μL 3 mg/kg | Day 8: IN 100 μL CA07 |
| | AC002566 | (4240 TCID50) |
| 6 | Day 1 and 3: IT 50 μL 3 mg/kg | Day 8: IN 100 μL CA07 |
| | AC002567 | (4240 TCID50) |
| 7 | Day 1 and 3: IT 50 μL 3 mg/kg | Day 8: IN 100 μL CA07 |
| | AC002568 | (4240 TCID50) |
| 8 | Day 1 and 3: IT 50 μL 3 mg/kg | Day 8: IN 100 μL CA07 |
| | AC002601 | (4240 TCID50) |

[0462] CA07 dose was quantified in TCID50 (50% tissue culture infective dose). This TCID50 dose was determined to be the optimal sub-lethal dose in accordance with the CA07 mouse model described in Example 3, above.

[0463] On Day 14, the animals were sacrificed. Lungs (both left and right) were collected and harvested. Expression of mouse H1N1 and M1 in lung was determined using qPCR, with 18s rRNA as endogenous control gene. Average H1N1 and M1 expression for each animal in lung tissue was normalized relative to Group 2 (no RNAi agent+CA07 infection). Results are shown in Table 43 below.

TABLE 43
Average relative expression of HIN1 and M1 in mice lung of Example 19.

| | Avg | | | Avg | | |
|---|---|---|---|---|---|---|
| Group ID | H1N1 | Low | High | M1 | Low | High |
| 1. Saline + PBS | N/A | N/A | N/A | N/A | N/A | N/A |
| 2. Saline + CA07 | 1.000 | 0.281 | 0.392 | 1.000 | 0.306 | 0.441 |
| 3. 3 mg/kg AC002564 + CA07 | 0.282 | 0.115 | 0.195 | 0.233 | 0.083 | 0.128 |
| 4. 3 mg/kg AC002569 + CA07 | 0.560 | 0.232 | 0.397 | 0.579 | 0.179 | 0.259 |
| 5. 3 mg/kg AC002566 + CA07 | 0.344 | 0.106 | 0.153 | 0.300 | 0.079 | 0.108 |
| 6. 3 mg/kg AC002567 + CA07 | 1.193 | 0.513 | 0.899 | 0.782 | 0.243 | 0.352 |
| 7. 3 mg/kg AC002568 + CA07 | 1.055 | 0.359 | 0.545 | 0.747 | 0.286 | 0.464 |
| 8. 3 mg/kg AC002601 + CA07 | 0.126 | 0.034 | 0.046 | 0.123 | 0.041 | 0.062 |

[0464] Groups 3 and 8 showed substantial reductions in H1N1 and M1; Groups 4 and 5 showed more modest reductions in H1N1 and M1; and Groups 6 and 7 showed no reductions in H1N1 and only very limited reductions in M1.

### Example 20. In Vivo Administration of IAV RNAi Agents to Mice Subsequently Infected with CA07 H1N1

[0465] Female C57Bl/6 mice animals were dosed with IAV RNAi agents and subsequently infected with CA07, in accordance with Example 4 (“CA07 H1N1 model mice”). On Days 1 and 3, four (n=4) mice (for Group 1) and five (n=5) mice (for Groups 2-8) were dosed with either saline or IAV RNAi agent formulated in saline (at 1.5 mg/kg), via intratracheal (IT) administration. On Day 8, the animals were dosed with either PBS or CA07 H1N1 formulated in PBS, via intranasal (IN) injection. Dosing was in accordance with Table 44 below.

TABLE 44
Dosing for mice animals of Example 20.

| Group | Dose (RNAi Agent) | Dose (CA07) |
|---|---|---|
| 1 | Day 1 and 3: IT 50 μL Saline | Day 8: IN 100 μL PBS |
| 2 | Day 1 and 3: IT 50 μL Saline | Day 8: IN 100 μL CA07 |
| | | (4240 TCID50) |
| 3 | Day 1 and 3: IT 50 μL 1.5 mg/kg | Day 8: IN 100 μL CA07 |
| | AC002564 | (4240 TCID50) |
| 4 | Day 1 and 3: IT 50 μL 1.5 mg/kg | Day 8: IN 100 μL CA07 |
| | AC002865 | (4240 TCID50) |
| 5 | Day 1 and 3: IT 50 μL 1.5 mg/kg | Day 8: IN 100 μL CA07 |
| | AC002866 | (4240 TCID50) |
| 6 | Day 1 and 3: IT 50 μL 1.5 mg/kg | Day 8: IN 100 μL CA07 |
| | AC002869 | (4240 TCID50) |
| 7 | Day 1 and 3: IT 50 μL 1.5 mg/kg | Day 8: IN 100 μL CA07 |
| | AC002870 | (4240 TCID50) |
| 8 | Day 1 and 3: IT 50 μL 1.5 mg/kg | Day 8: IN 100 μL CA07 |
| | AC002872 | (4240 TCID50) |

[0466] CA07 dose was quantified in TCID50 (50% tissue culture infective dose). This TCID50 dose was determined to be the optimal sub-lethal dose in accordance with the CA07 mouse model described in Example 3, above.

[0467] On Day 14, the animals were sacrificed. Lungs (both left and right) were collected and harvested. Expression of mouse H1N1 and M1 in lung was determined using qPCR, with 18s rRNA as endogenous control gene. Average H1N1 and M1 expression for each animal in lung tissue was normalized relative to Group 2 (no RNAi agent+CA07 infection). Results are shown in Table 45 below.

TABLE 45
Average relative expression of H1N1 and M1 in mice lung of Example 20.

| | Avg | | | Avg | | |
|---|---|---|---|---|---|---|
| Group ID | H1N1 | Low | High | M1 | Low | High |
| 1. Saline + PBS | N/A | N/A | N/A | N/A | N/A | N/A |
| 2. Saline + CA07 | 1.000 | 0.309 | 0.448 | 1.000 | 0.221 | 0.283 |
| 3. 1.5 mg/kg AC002564 + CA07 | 0.208 | 0.099 | 0.189 | 0.252 | 0.091 | 0.143 |
| 4. 1.5 mg/kg AC002865 + CA07 | 0.140 | 0.064 | 0.118 | 0.221 | 0.090 | 0.152 |
| 5. 1.5 mg/kg AC002866 + CA07 | 0.165 | 0.069 | 0.120 | 0.215 | 0.069 | 0.103 |
| 6. 1.5 mg/kg AC002869 + CA07 | 0.155 | 0.046 | 0.066 | 0.245 | 0.087 | 0.135 |
| 7. 1.5 mg/kg AC002870 + CA07 | 0.203 | 0.066 | 0.099 | 0.354 | 0.148 | 0.255 |
| 8. 1.5 mg/kg AC002872 + CA07 | 0.237 | 0.023 | 0.026 | 0.366 | 0.085 | 0.111 |

[0468] Each of Groups 3-8 showed meaningful reductions in both H1N1 and in M1.

### Example 21. In Vivo Administration of IAV RNAi Agents to Mice Subsequently Infected with CA07 H1N1

[0469] Female C57Bl/6 mice animals were dosed with IAV RNAi agents and subsequently infected with CA07, in accordance with Example 4 (“CA07 H1N1 model mice”). On Days 1 and 3, eight (n=8) mice (for Groups 1-5) were dosed with either saline or IAV RNAi agent formulated in saline (at 3 mg/kg), via intratracheal (IT) administration. On Day 8, the animals were dosed with either PBS or CA07 H1N1 formulated in PBS, via intranasal (IN) injection. Dosing was in accordance with Table 46 below.

TABLE 46
Dosing for mice animals of Example 21.

| Group | Dose (RNAi Agent) | Dose (CA07) |
|---|---|---|
| 1 | Day 1 and 3: IT 50 μL Saline | Day 8: IN 100 μL PBS |
| 2 | Day 1 and 3: IT 50 μL Saline | Day 8: IN 100 μL CA07 |
| | | (12000 TCID50) |
| 3 | Day 1 and 3: IT 50 μL 3 mg/kg | Day 8: IN 100 μL CA07 |
| | AC002601 | (12000 TCID50) |
| 4 | Day 1 and 3: IT 50 μL Saline | Day 8: IN 100 μL CA07 |
| | | (24000 TCID50) |
| 5 | Day 1 and 3: IT 50 μL 3 mg/kg | Day 8: IN 100 μL CA07 |
| | AC002601 | (24000 TCID50) |

[0470] CA07 dose was quantified in TCID50 (50% tissue culture infective dose).

[0471] On Day 22, the animals were sacrificed. Mice were observed for body weight and survival rates post CA07 infection. The survival rates are shown in Table 47 below.

TABLE 47
Survival rates of test animals post CA07 infection of Example 21.

| Group ID | % Survival |
|---|---|
| 1. Saline + PBS | 100% 11 days post infection |
| 2. Saline + CA07 (12000 TCID50) | 62.5% 5 days post infection |
| | 50% 6 days post infection |
| | 25% 7 days post infection |
| | 12.5% 10 days post infection |
| | 12.5% 11 days post infection |
| 3. AC002601 + CA07 (12000 TCID50) | 100% 11 days post infection |
| 4. Saline + CA07 (24000 TCID50) | 75% 4 days post infection |
| | 12.5% 5 days post infection |
| | 0% 7 days post infection |
| 5. AC002601 + CA07 (24000 TCID50) | 87.5% 7 days post infection |
| | 87.5% 11 days post infection |

[0472] Dosing with AC002601, followed by subsequent infection with CA07 (12000 TCID50), achieved 100% survival rate at Day 11 post infection. Dosing with AC002601, followed by subsequent infection with CA07 (24000 TCID50), achieved 87.5% survival rate at 11 days post infection. This is contrasted with only a 12.5% survival rate 11 days post infection in Group 2 and a 0% survival rate 7 days post infection in Group 4, where in both cases the same infection was administered to the mice but no IAV RNAi agent was dosed.

### Example 22. In Vivo Administration of IAV RNAi Agents to Mice Subsequently Infected with CA07 H1N1

[0473] Female C57Bl/6 mice animals were dosed with IAV RNAi agents and subsequently infected with CA07, in accordance with Example 4 (“CA07 H1N1 model mice”). On Days 1 and 3, four (n=4) mice (for Group 1) and five (n=5) mice (for Groups 2-8) were dosed with either saline or IAV RNAi agent formulated in saline (at 3 mg/kg), via intratracheal (IT) administration. On Day 8, the animals were dosed with either PBS or CA07 H1N1 formulated in PBS, via intranasal (IN) injection. Dosing was in accordance with Table 48 below.

TABLE 48
Dosing for mice animals of Example 22.

| Group | Dose (RNAi Agent) | Dose (CA07) |
|---|---|---|
| 1 | Day 1 and 3: IT 50 μL Saline | Day 8: IN 100 μL PBS |
| 2 | Day 1 and 3: IT 50 μL Saline | Day 8: IN 100 μL CA07 |
| | | (4240 TCID50) |
| 3 | Day 1 and 3: IT 50 μL 3 mg/kg | Day 8: IN 100 μL CA07 |
| | AC002601 | (4240 TCID50) |
| 4 | Day 1 and 3: IT 50 μL 3 mg/kg | Day 8: IN 100 μL CA07 |
| | AC002908 | (4240 TCID50) |
| 5 | Day 1 and 3: IT 50 μL 3 mg/kg | Day 8: IN 100 μL CA07 |
| | AC002599 | (4240 TCID50) |
| 6 | Day 1 and 3: IT 50 μL 3 mg/kg | Day 8: IN 100 μL CA07 |
| | AC002600 | (4240 TCID50) |
| 7 | Day 1 and 3: IT 50 μL 3 mg/kg | Day 8: IN 100 μL CA07 |
| | AC002909 | (4240 TCID50) |
| 8 | Day 1 and 3: IT 50 μL 3 mg/kg | Day 8: IN 100 μL CA07 |
| | AC002367 | (4240 TCID50) |

[0474] CA07 dose was quantified in TCID50 (50% tissue culture infective dose). This TCID50 dose was determined to be the optimal sub-lethal dose in accordance with the CA07 mouse model described in Example 3, above.

[0475] On Day 14, the animals were sacrificed. Lungs (both left and right) were collected and harvested. Expression of mouse H1N1 and M1 in lung was determined using qPCR, with 18s rRNA as endogenous control gene. Average H1N1 and M1 expression for each animal in lung tissue was normalized relative to Group 2 (no RNAi agent+CA07 infection). Results are shown in Table 49 below.

TABLE 49
Average relative expression of HIN1 and M1 in mice lung of Example 22.

| | Avg | | | Avg | | |
|---|---|---|---|---|---|---|
| Group ID | H1N1 | Low | High | M1 | Low | High |
| 1. Saline + PBS | N/A | N/A | N/A | N/A | N/A | N/A |
| 2. Saline + CA07 | 1.000 | 0.577 | 1.366 | 1.000 | 0.578 | 1.369 |
| 3. 3 mg/kg AC002601 + CA07 | 0.073 | 0.040 | 0.087 | 0.062 | 0.026 | 0.044 |
| 4. 3 mg/kg AC002908 + CA07 | 0.762 | 0.414 | 0.904 | 0.513 | 0.288 | 0.659 |
| 5. 3 mg/kg AC002599 + CA07 | 0.498 | 0.255 | 0.524 | 0.376 | 0.194 | 0.399 |
| 6. 3 mg/kg AC002600 + CA07 | 0.549 | 0.223 | 0.374 | 0.272 | 0.086 | 0.126 |
| 7. 3 mg/kg AC002909 + CA07 | 1.084 | 0.468 | 0.824 | 0.463 | 0.273 | 0.663 |
| 8. 3 mg/kg AC002367 + CA07 | 0.717 | 0.377 | 0.795 | 0.312 | 0.106 | 0.161 |

[0476] Group 3 showed substantial reductions in H1N1 and M1.

### Example 23. In Vivo Administration of IAV RNAi Agents to Mice Subsequently Infected with CA07 H1N1

[0477] Female C57Bl/6 mice animals were dosed with IAV RNAi agents and subsequently infected with CA07, in accordance with Example 4 (“CA07 H1N1 model mice”). On Days 1 and 3, four (n=4) mice (for Group 1) and five (n=5) mice (for Groups 2-8) were dosed with either saline or IAV RNAi agent formulated in saline (at 3 mg/kg), via intratracheal (IT) administration. On Day 8, the animals were dosed with either PBS or CA07 H1N1 formulated in PBS, via intranasal (IN) injection. Dosing was in accordance with Table 50 below.

TABLE 50
Dosing for mice animals of Example 23.

| Group | Dose (RNAi Agent) | Dose (CA07) |
|---|---|---|
| 1 | Day 1 and 3: IT 50 μL Saline | Day 8: IN 100 μL PBS |
| 2 | Day 1 and 3: IT 50 μL Saline | Day 8: IN 100 μL CA07 |
| | | (4240 TCID50) |
| 3 | Day 1 and 3: IT 50 μL 3 mg/kg | Day 8: IN 100 μL CA07 |
| | AC002601 | (4240 TCID50) |
| 4 | Day 1 and 3: IT 50 μL 3 mg/kg | Day 8: IN 100 μL CA07 |
| | AC002564 | (4240 TCID50) |
| 5 | Day 1 and 3: IT 50 μL 3 mg/kg | Day 8: IN 100 μL CA07 |
| | AC002369 | (4240 TCID50) |
| 6 | Day 1 and 3: IT 50 μL 3 mg/kg | Day 8: IN 100 μL CA07 |
| | AC002682 | (4240 TCID50) |
| 7 | Day 1 and 3: IT 50 μL 3 mg/kg | Day 8: IN 100 μL CA07 |
| | AC002683 | (4240 TCID50) |
| 8 | Day 1 and 3: IT 50 μL 3 mg/kg | Day 8: IN 100 μL CA07 |
| | AC002910 | (4240 TCID50) |

[0478] CA07 dose was quantified in TCID50 (50% tissue culture infective dose). This TCID50 dose was determined to be the optimal sub-lethal dose in accordance with the CA07 mouse model described in Example 3, above.

[0479] On Day 14, the animals were sacrificed. Lungs (both left and right) were collected and harvested. Expression of mouse H1N1 and M1 in lung was determined using qPCR, with 18s rRNA as endogenous control gene. Average H1N1 and M1 expression for each animal in lung tissue was normalized relative to Group 2 (no RNAi agent+CA07 infection). Results are shown in Table 51 below.

TABLE 51
Average relative expression of H1N1 and M1 in mice lung of Example 23.

| | Avg | | | Avg | | |
|---|---|---|---|---|---|---|
| Group ID | H1N1 | Low | High | M1 | Low | High |
| 1. Saline + PBS | N/A | N/A | N/A | N/A | N/A | N/A |
| 2. Saline + CA07 | 1.000 | 0.161 | 0.192 | 1.000 | 0.200 | 0.250 |
| 3. 3 mg/kg AC002601 + CA07 | 0.138 | 0.034 | 0.045 | 0.169 | 0.046 | 0.062 |
| 4. 3 mg/kg AC002564 + CA07 | 0.343 | 0.047 | 0.055 | 0.349 | 0.059 | 0.071 |
| 5. 3 mg/kg AC002369 + CA07 | 0.751 | 0.259 | 0.397 | 0.869 | 0.261 | 0.373 |
| 6. 3 mg/kg AC002682 + CA07 | 0.937 | 0.179 | 0.222 | 0.971 | 0.202 | 0.256 |
| 7. 3 mg/kg AC002683 + CA07 | 1.132 | 0.204 | 0.250 | 1.152 | 0.201 | 0.243 |
| 8. 3 mg/kg AC002910 + CA07 | 1.351 | 0.373 | 0.516 | 1.267 | 0.359 | 0.501 |

[0480] Group 3 (AC002601) showed substantial reductions in H1N1 and M1. Group 4 (AC002564) showed more modest reductions in H1N1 and M1. The remaining Groups (Groups 5-8) showed limited to no inhibition of H1N1 and M1.

### Example 24. In Vivo Administration of IAV RNAi Agents to Mice Subsequently Infected with CA07 H1N1

[0481] Female C57Bl/6 mice animals were dosed with IAV RNAi agents and subsequently infected with CA07, in accordance with Example 4 (“CA07 H1N1 model mice”). On Days 1 and 3, eight (n=8) mice (for Groups 1-5) were dosed with either saline or IAV RNAi agent formulated in saline (at 3 mg/kg), via intratracheal (IT) administration. On Day 8, the animals were dosed with either PBS or CA07 H1N1 formulated in PBS, via intranasal (IN) injection. Dosing was in accordance with Table 52 below.

TABLE 52
Dosing for mice animals of Example 24.

| Group | Dose (RNAi Agent) | Dose (CA07) |
|---|---|---|
| 1 | Day 1 and 3: IT 50 μL Saline | Day 8: IN 100 μL PBS |
| 2 | Day 1 and 3: IT 50 μL Saline | Day 8: IN 100 μL CA07 |
| | | (12000 TCID50) |
| 3 | Day 1 and 3: IT 50 μL 3 mg/kg | Day 8: IN 100 μL CA07 |
| | AC002564 | (12000 TCID50) |
| 4 | Day 1 and 3: IT 50 μL Saline | Day 8: IN 100 μL CA07 |
| | | (24000 TCID50) |
| 5 | Day 1 and 3: IT 50 μL 3 mg/kg | Day 8: IN 100 μL CA07 |
| | AC002564 | (24000 TCID50) |

[0482] CA07 dose was quantified in TCID50 (50% tissue culture infective dose).

[0483] On Day 22, the animals were sacrificed. Mice were observed for body weight and survival rates post CA07 infection. The survival rates are shown in Table 53 below.

TABLE 53
Survival rates of test animals post CA07 infection of Example 24.

| Group ID | % Survival |
|---|---|
| 1. Saline + PBS | 100% 15 days post infection |
| 2. Saline + CA07 | 66% 7 days post infection |
| (12000 TCID50) | 33% 8 days post infection |
| | 33% 15 days post infection |
| 3. AC002564 + CA07 | 83.3% 8 days post infection |
| (12000 TCID50) | 83.3% 15 days post infection |
| 4. Saline + CA07 | 87.5% 5 days post infection |
| (24000 TCID50) | 75% 6 days post infection |
| | 62.5% 7 days post infection |
| | 25% 8 days post infection |
| | 25% 15 days post infection |
| 5. AC002564 + CA07 | 87.5% 7 days post infection |
| (24000 TCID50) | 75% 8 days post infection |
| | 75% 15 days post infection |

[0484] Dosing with AC002564, followed by subsequent infection with CA07 (12000 TCID50), achieved 83.3% survival rate at 15 days post infection. Dosing with AC002564, followed by subsequent infection with CA07 (24000 TCID50), achieved 75% survival rate at 15 days post infection. This is in contrast to Group 2 (only a 33% survival rate at 15 days post infection) and Group 4 (only 25% survival rate at 15 days post infection), where no RNAi agent was administered.

### Example 25. In Vivo Administration of IAV RNAi Agents to Mice Subsequently Infected with CA07 H1N1

[0485] Female C57Bl/6 mice animals were dosed with IAV RNAi agents and subsequently infected with CA07, in accordance with Example 4 (“CA07 H1N1 model mice”). On Days 1 and 3, four (n=4) mice (for Group 1) and five (n=5) mice (for Groups 2-8) were dosed with either saline or IAV RNAi agent formulated in saline (at 3 mg/kg), via intratracheal (IT) administration. On Day 8, the animals were dosed with either PBS or CA07 H1N1 formulated in PBS, via intranasal (IN) injection. Dosing was in accordance with Table 54 below.

TABLE 54
Dosing for mice animals of Example 25.

| Group | Dose (RNAi Agent) | Dose (CA07) |
|---|---|---|
| 1 | Day 1 and 3: IT 50 μL Saline | Day 8: IN 100 μL PBS |
| 2 | Day 1 and 3: IT 50 μL Saline | Day 8: IN 100 μL CA07 |
| | | (4240 TCID50) |
| 3 | Day 1 and 3: IT 50 μL 3 mg/kg | Day 8: IN 100 μL CA07 |
| | AC002601 | (4240 TCID50) |
| 4 | Day 1 and 3: IT 50 μL 3 mg/kg | Day 8: IN 100 μL CA07 |
| | AC002925 | (4240 TCID50) |
| 5 | Day 1 and 3: IT 50 μL 3 mg/kg | Day 8: IN 100 μL CA07 |
| | AC002926 | (4240 TCID50) |
| 6 | Day 1 and 3: IT 50 μL 3 mg/kg | Day 8: IN 100 μL CA07 |
| | AC002927 | (4240 TCID50) |
| 7 | Day 1 and 3: IT 50 μL 3 mg/kg | Day 8: IN 100 μL CA07 |
| | AC002928 | (4240 TCID50) |
| 8 | Day 1 and 3: IT 50 μL 3 mg/kg | Day 8: IN 100 μL CA07 |
| | AC002929 | (4240 TCID50) |

[0486] CA07 dose was quantified in TCID50 (50% tissue culture infective dose). This TCID50 dose was determined to be the optimal sub-lethal dose in accordance with the CA07 mouse model described in Example 3, above.

[0487] On Day 14, the animals were sacrificed. Lungs (both left and right) were collected and harvested. Expression of mouse H1N1 and M1 in lung was determined using qPCR, with 18s rRNA as endogenous control gene. Average H1N1 and M1 expression for each animal in lung tissue was normalized relative to Group 2 (no RNAi agent+CA07 infection). Results are shown in Table 55 below.

TABLE 55
Average relative expression of H1N1 and M1 in mice lung of Example 25.

| | Avg | | | Avg | | |
|---|---|---|---|---|---|---|
| Group ID | H1N1 | Low | High | M1 | Low | High |
| 1. Saline + PBS | N/A | N/A | N/A | N/A | N/A | N/A |
| 2. Saline + CA07 | 1.000 | 0.301 | 0.430 | 1.000 | 0.369 | 0.586 |
| 3. 3 mg/kg AC002601 + CA07 | 0.088 | 0.041 | 0.077 | 0.095 | 0.034 | 0.053 |
| 4. 3 mg/kg AC002925 + CA07 | 0.183 | 0.093 | 0.191 | 0.145 | 0.085 | 0.207 |
| 5. 3 mg/kg AC002926 + CA07 | 0.142 | 0.042 | 0.059 | 0.097 | 0.033 | 0.049 |
| 6. 3 mg/kg AC002927 + CA07 | 0.097 | 0.053 | 0.118 | 0.042 | 0.017 | 0.030 |
| 7. 3 mg/kg AC002928 + CA07 | 0.170 | 0.077 | 0.139 | 0.064 | 0.026 | 0.045 |
| 8. 3 mg/kg AC002929 + CA07 | 0.125 | 0.064 | 0.132 | 0.093 | 0.040 | 0.069 |

[0488] Each of Groups 3-8 showed reduction in H1N1 and in M1.

### Example 26. In Vivo Administration of IAV RNAi Agents to Mice Subsequently Infected with CA07 H1N1

[0489] Female C57Bl/6 mice animals were dosed with IAV RNAi agents and subsequently infected with CA07, in accordance with Example 4 (“CA07 H1N1 model mice”). On Days 1 and 3, four (n=4) mice (for Group 1) and five (n=5) mice (for Groups 2-8) were dosed with either saline or IAV RNAi agent formulated in saline (at 3 mg/kg), via intratracheal (IT) administration. On Day 8, the animals were dosed with either PBS or CA07 H1N1 formulated in PBS, via intranasal (IN) injection. Dosing was in accordance with Table 56 below.

TABLE 56
Dosing for mice animals of Example 26.

| Group | Dose (RNAi Agent) | Dose (CA07) |
|---|---|---|
| 1 | Day 1 and 3: IT 50 μL | Day 8: IN 100 μL PBS |
| | Saline | |
| 2 | Day 1 and 3: IT 50 μL | Day 8: IN 100 μL CA07 |
| | Saline | (4240 TCID50) |
| 3 | Day 1 and 3: IT 50 μL | Day 8: IN 100 μL CA07 |
| | 3 mg/kg AC002601 | (4240 TCID50) |
| 4 | Day 1 and 3: IT 50 μL | Day 8: IN 100 μL CA07 |
| | 3 mg/kg AC002930 | (4240 TCID50) |
| 5 | Day 1 and 3: IT 50 μL | Day 8: IN 100 μL CA07 |
| | 3 mg/kg AC002931 | (4240 TCID50) |
| 6 | Day 1 and 3: IT 50 μL | Day 8: IN 100 μL CA07 |
| | 3 mg/kg AC002932 | (4240 TCID50) |
| 7 | Day 1 and 3: IT 50 μL | Day 8: IN 100 μL CA07 |
| | 3 mg/kg AC002933 | (4240 TCID50) |
| 8 | Day 1 and 3: IT 50 μL | Day 8: IN 100 μL CA07 |
| | 3 mg/kg AC002934 | (4240 TCID50) |

[0490] CA07 dose was quantified in TCID50 (50% tissue culture infective dose). This TCID50 dose was determined to be the optimal sub-lethal dose in accordance with the CA07 mouse model described in Example 3, above.

[0491] On Day 14, the animals were sacrificed. Lungs (both left and right) were collected and harvested. Expression of mouse H1N1 and M1 in lung was determined using qPCR, with 18s rRNA as endogenous control gene. Average H1N1 and M1 expression for each animal in lung tissue was normalized relative to Group 2 (no RNAi agent+CA07 infection). Results are shown in Table 57 below.

TABLE 57
Average relative expression of H1N1 and M1 in mice lung of Example 26.

| | Avg | | | Avg | | |
|---|---|---|---|---|---|---|
| Group ID | H1N1 | Low | High | M1 | Low | High |
| 1. Saline + PBS | N/A | N/A | N/A | N/A | N/A | N/A |
| 2. Saline + CA07 | 1.000 | 0.590 | 1.438 | 1.000 | 0.192 | 0.238 |
| 3. 3 mg/kg AC002601 + CA07 | 0.157 | 0.050 | 0.074 | 0.478 | 0.254 | 0.541 |
| 4. 3 mg/kg AC002930 + CA07 | 0.183 | 0.090 | 0.177 | 0.441 | 0.271 | 0.701 |
| 5. 3 mg/kg AC002931 + CA07 | 0.125 | 0.056 | 0.103 | 0.282 | 0.146 | 0.305 |
| 6. 3 mg/kg AC002932 + CA07 | 0.173 | 0.110 | 0.299 | 0.244 | 0.151 | 0.392 |
| 7. 3 mg/kg AC002933 + CA07 | 0.136 | 0.065 | 0.125 | 0.178 | 0.064 | 0.100 |
| 8. 3 mg/kg AC002934 + CA07 | 0.284 | 0.112 | 0.184 | 0.306 | 0.075 | 0.099 |

[0492] Groups 3-8 showed certain reductions in H1N1 and in M1.

### Example 27. In Vivo Administration of IAV RNAi Agents to Mice Previously and Subsequently Infected with CA07 H1N1

[0493] Female C57Bl/6 Mice animals were dosed with IAV RNAi agents and subsequently infected with CA07, in accordance with Example 4 (“CA07 H1N1 model Mice”). On Days 1, 2, and/or 3, five (n=5) Mice (for Groups 1-8) were dosed with either saline or IAV RNAi agent formulated in saline (at 3 mg/kg or 6 mg/kg), via intratracheal (IT) or intranasal (IN) administration. On Day 1, the animals were dosed with either PBS or CA07 H1N1 formulated in PBS, via intranasal (IN) injection. Dosing was in accordance with Table 58 below.

TABLE 58
Dosing for mice animals of Example 27.

| Group | Dose (RNAi Agent) | Dose (CA07) |
|---|---|---|
| 1 | Day 1 (4 hours | Day 8: IN |
| | post infection): | 100 μL PBS |
| | IT 50 μL Saline | |
| | Day 2: IT 50 μL Saline | |
| 2 | Day 1 (4 hours | Day 8: IN |
| | post infection): | 100 μL CA07 |
| | IN 50 μL Saline | (4240 TCID50) |
| 3 | Day 1 (2 hours | Day 8: IN |
| | before infection): | 100 μL CA07 |
| | IN 50 μL 3 mg/kg | (4240 TCID50) |
| | AC002601 | |
| 4 | Day 1 (2 hours | Day 8: IN |
| | before infection): | 100 μL CA07 |
| | IN 50 μL 6 mg/kg | (4240 TCID50) |
| | AC002601 | |
| 5 | Day 1 (4 hours | Day 8: IN |
| | post infection): | 100 μL CA07 |
| | IN 50 μL 3 mg/kg | (4240 TCID50) |
| | AC002601 | |
| 6 | Day 1 (4 hours | Day 8: IN |
| | post infection): | 100 μL CA07 |
| | IN 50 μL 3 mg/kg | (4240 TCID50) |
| | AC002601 | |
| | Day 2: IN 50 μL | |
| | 3 mg/kg AC002601 | |
| 7 | Day 1 (4 hours | Day 8: IN |
| | post infection): | 100 μL CA07 |
| | IN 50 μL 6 mg/kg | (4240 TCID50) |
| | AC002601 | |
| | Day 2: IN 50 μL | |
| | 6 mg/kg AC002601 | |
| 8 | Day 1 (4 hours | Day 8: IN |
| | post infection): | 100 μL CA07 |
| | IN 50 μL 3 mg/kg | (4240 TCID50) |
| | AC002601 | |
| | Day 2: IN 50 μL | |
| | 3 mg/kg AC002601 | |
| | Day 3: IN 50 μL | |
| | 3 mg/kg AC002601 | |

[0494] CA07 dose was quantified in TCID50 (50% tissue culture infective dose). This TCID50 dose was determined to be the optimal sub-lethal dose in accordance with the CA07 mouse model described in Example 3, above.

[0495] On Day 7, the animals were sacrificed. Lungs (both left and right) were collected and harvested. Expression of mouse H1N1 in lung was determined using qPCR, with 18s rRNA as endogenous control gene. Average H1N1 expression for each animal in lung tissue was normalized relative to Group 2 (no RNAi agent+CA07 infection). Results are shown in Table 59 below.

TABLE 59
Average relative expression of H1N1 in mice lung of Example 27.

| | Avg | | |
|---|---|---|---|
| Group ID | H1N1 | Low | High |
| 1. Saline + PBS | N/A | N/A | N/A |
| 2. Saline + CA07 | 1.000 | 0.388 | 0.392 |
| 3. D 1 3 mg/kg AC002601 | 0.092 | 0.036 | 0.059 |
| (2 h before CA07) + CA07 | | | |
| 4. D 1 6 mg/kg AC002601 | 0.060 | 0.028 | 0.052 |
| (2 h before CA07) + CA07 | | | |
| 5. D 1 3 mg/kg AC002601 | 0.240 | 0.071 | 0.100 |
| (4 h post CA07) + CA07 | | | |
| 6. D 1 3 mg/kg AC002601 | 0.071 | 0.029 | 0.049 |
| (4 h post CA07) + D 2 3 | | | |
| mg/kg AC002601 + CA07 | | | |
| 7. D 1 6 mg/kg AC002601 | 0.084 | 0.055 | 0.154 |
| (4 h post CA07) + D2 6 | | | |
| mg/kg AC002601 + CA07 | | | |
| 8. D1 3 mg/kg AC002601 | 0.396 | 0.110 | 0.153 |
| (4 h post CA07) + D2 3 | | | |
| mg/kg AC002601 + D3 3 | | | |
| mg/kg AC002601 + CA07 | | | |

[0496] Groups 3, 4, 6, and 7 showed substantial reduction of H1N1, and Groups 5 and 8 showed more modest reduction of H1N1.

### Example 28. In Vivo Administration of IAV RNAi Agents to Mice Subsequently Infected with CA07 H1N1

[0497] Female C57Bl/6 mice animals were dosed with IAV RNAi agents and subsequently infected with CA07, in accordance with Example 4 (“CA07 H1N1 model mice”). On Days 1 and 3, five (n=5) mice (for Groups 1-8) were dosed with either saline or IAV RNAi agent formulated in saline (at 0.75 mg/kg), via intratracheal (IT) administration. On Day 8, the animals were dosed with either PBS or CA07 H1N1 formulated in PBS, via intranasal (IN) injection. Dosing was in accordance with Table 60 below.

TABLE 60
Dosing for mice animals of Example 28.

| Group | Dose (RNAi Agent) | Dose (CA07) |
|---|---|---|
| 1 | Day 1 and 3: IT 50 μL | Day 8: IN 100 μL PBS |
| | Saline | |
| 2 | Day 1 and 3: IT 50 μL | Day 8: IN 100 μL CA07 |
| | Saline | (4240 TCID50) |
| 3 | Day 1 and 3: IT 50 μL | Day 8: IN 100 μL CA07 |
| | 0.75 mg/kg AC002564 | (4240 TCID50) |
| 4 | Day 1 and 3: IT 50 μL | Day 8: IN 100 μL CA07 |
| | 0.75 mg/kg AC002863 | (4240 TCID50) |
| 5 | Day 1 and 3: IT 50 μL | Day 8: IN 100 μL CA07 |
| | 0.75 mg/kg AC002864 | (4240 TCID50) |
| 6 | Day 1 and 3: IT 50 μL | Day 8: IN 100 μL CA07 |
| | 0.75 mg/kg AC002865 | (4240 TCID50) |
| 7 | Day 1 and 3: IT 50 μL | Day 8: IN 100 μL CA07 |
| | 0.75 mg/kg AC002866 | (4240 TCID50) |
| 8 | Day 1 and 3: IT 50 μL | Day 8: IN 100 μL CA07 |
| | 0.75 mg/kg AC002869 | (4240 TCID50) |

[0498] CA07 dose was quantified in TCID50 (50% tissue culture infective dose). This TCID50 dose was determined to be the optimal sub-lethal dose in accordance with the CA07 mouse model described in Example 3, above.

[0499] On Day 14, the animals were sacrificed. Lungs (both left and right) were collected and harvested. Expression of mouse H1N1 and M1 in lung was determined using qPCR, with 18s rRNA as endogenous control gene. Average H1N1 and M1 expression for each animal in lung tissue was normalized relative to Group 2 (no RNAi agent+CA07 infection). Results are shown in Table 61 below.

TABLE 61
Average relative expression of H1N1 and M1 in mice lung of Example 28.

| | Avg | | | Avg | | |
|---|---|---|---|---|---|---|
| Group ID | H1N1 | Low | High | M1 | Low | High |
| 1. Saline + PBS | N/A | N/A | N/A | N/A | N/A | N/A |
| 2. Saline + CA07 | 1.000 | 0.472 | 0.446 | 1.000 | 0.536 | 0.611 |
| 3. 0.75 mg/kg AC002564+ CA07 | 0.301 | 0.105 | 0.162 | 0.297 | 0.090 | 0.130 |
| 4. 0.75 mg/kg AC002863+ CA07 | 0.213 | 0.067 | 0.098 | 0.213 | 0.070 | 0.104 |
| 5. 0.75 mg/kg AC002864+ CA07 | 0.159 | 0.073 | 0.136 | 0.147 | 0.063 | 0.111 |
| 6. 0.75 mg/kg AC002865+ CA07 | 0.123 | 0.047 | 0.077 | 0.123 | 0.046 | 0.072 |
| 7. 0.75 mg/kg AC002866+ CA07 | 0.189 | 0.063 | 0.095 | 0.184 | 0.086 | 0.162 |
| 8. 0.75 mg/kg AC002869+ CA07 | 0.148 | 0.055 | 0.088 | 0.114 | 0.042 | 0.066 |

[0500] Groups 3-8 each showed reductions in H1N1 and in M1.

### Example 29. In Vivo Administration of IAV RNAi Agents to Mice Subsequently Infected with CA07 H1N1

[0501] Female C57Bl/6 mice animals were dosed with IAV RNAi agents and subsequently infected with CA07, in accordance with Example 4 (“CA07 H1N1 model mice”). On Days 1 and 3, four (n=4) mice (for Group 1) and five (n=5) mice (for Groups 2-8) were dosed with either saline or IAV RNAi agent formulated in saline (at 1 mg/kg or 2 mg/kg), via intratracheal (IT) administration. On Day 8, the animals were dosed with either PBS or CA07 H1N1 formulated in PBS, via intranasal (IN) injection. Dosing was in accordance with Table 62 below.

TABLE 62
Dosing for mice animals of Example 29.

| Group | Dose (RNAi Agent) | Dose (CA07) |
|---|---|---|
| 1 | Day 1 and 3: IT 50 μL | Day 8: IN 100 μL PBS |
| | Saline | |
| 2 | Day 1 and 3: IT 50 μL | Day 8: IN 100 μL CA07 |
| | Saline | (4240 TCID50) |
| 3 | Day 1 and 3: IT 50 μL | Day 8: IN 100 μL CA07 |
| | 2 mg/kg AC002601 | (4240 TCID50) |
| 4 | Day 1 and 3: IT 50 μL | Day 8: IN 100 μL CA07 |
| | 2 mg/kg AC002927 | (4240 TCID50) |
| 5 | Day 1 and 3: IT 50 μL | Day 8: IN 100 μL CA07 |
| | 2 mg/kg AC002929 | (4240 TCID50) |
| 6 | Day 1 and 3: IT 50 μL | Day 8: IN 100 μL CA07 |
| | 1 mg/kg AC002601 | (4240 TCID50) |
| 7 | Day 1 and 3: IT 50 μL | Day 8: IN 100 μL CA07 |
| | 1 mg/kg AC002927 | (4240 TCID50) |
| 8 | Day 1 and 3: IT 50 μL | Day 8: IN 100 μL CA07 |
| | 1 mg/kg AC002929 | (4240 TCID50) |

[0502] CA07 dose was quantified in TCID50 (50 tissue culture infective dose). This TCID50 dose was determined to be the optimal sub-lethal dose in accordance with the CA07 mouse model described in Example 3, above.

[0503] On Day 14, the animals were sacrificed. Lungs (both left and right) were collected and harvested. Expression of mouse H1N1 and M1 in lung was determined using qPCR, with 18s rRNA as endogenous control gene. Average H1N1 and M1 expression for each animal in lung tissue was normalized relative to Group 2 (no RNAi agent+CA07 infection). Results are shown in Table 63 below.

TABLE 63
Average relative expression of H1N1 and M1 in mice lung of Example 29.

| | Avg | | | Avg | | |
|---|---|---|---|---|---|---|
| Group ID | H1N1 | Low | High | M1 | Low | High |
| 1. Saline + PBS | N/A | N/A | N/A | N/A | N/A | N/A |
| 2. Saline + CA07 | 1.000 | 0.171 | 0.206 | 1.000 | 0.219 | 0.280 |
| 3. 2 mg/kg AC002601+ CA07 | 0.212 | 0.095 | 0.172 | 0.226 | 0.091 | 0.152 |
| 4. 2 mg/kg AC002927+ CA07 | 0.130 | 0.046 | 0.071 | 0.135 | 0.049 | 0.076 |
| 5. 2 mg/kg AC002929+ CA07 | 0.293 | 0.168 | 0.394 | 0.309 | 0.162 | 0.340 |
| 6. 1 mg/kg AC002601+ CA07 | 0.398 | 0.199 | 0.398 | 0.450 | 0.221 | 0.433 |
| 7. 1 mg/kg AC002927+ CA07 | 0.211 | 0.096 | 0.175 | 0.257 | 0.134 | 0.278 |
| 8. 1 mg/kg AC002929+ CA07 | 0.159 | 0.063 | 0.105 | 0.225 | 0.080 | 0.125 |

[0504] Groups 3-8 each showed reductions in H1N1 and in M1.

### Example 30. In Vivo Administration of IAV RNAi Agents to Mice Previously Infected with CA07 H1N1

[0505] Female C57Bl/6 mice animals were first infected with CA07 and then subsequently dosed with IAV RNAi agents, in accordance with Example 4 (“CA07 H1N1 model mice”). On Day 1, five (n=5) mice (for Groups 1-7) were dosed with either saline or IAV RNAi agent formulated in saline (at 3 mg/kg or 6 mg/kg), via intratracheal (IT) administration. On Day 1, the animals were dosed with either PBS or CA07 H1N1 formulated in PBS, via intranasal (IN) injection. Dosing was in accordance with Table 64 below.

TABLE 64
Dosing for mice animals of Example 30.

| Group | Dose (RNAi Agent) | Dose (CA07) |
|---|---|---|
| 1 | Day 1: IT 50 μL Saline | Day 1: IN 100 μL PBS |
| | (4 hours post-infection) | |
| 2 | Day 1: IT 50 μL Saline | Day 1: IN 100 μL CA07 |
| | (4 hours post-infection) | (4240 TCID50) |
| 3 | Day 1: IT 50 μL Saline | Day 1: IN 100 μL CA07 |
| | (8 hours post-infection) | (4240 TCID50) |
| 4 | Day 1: IT 50 μL 3 mg/kg | Day 1: IN 100 μL CA07 |
| | AC002564 (4 hours post- | (4240 TCID50) |
| | infection) | |
| 5 | Day 1: IT 100 μL 6 mg/kg | Day 1: IN 100 μL CA07 |
| | AC002564 (4 hours post- | (4240 TCID50) |
| | infection) | |
| 6 | Day 1: IT 50 μL 3 mg/kg | Day 1: IN 100 μL CA07 |
| | AC002564 (8 hours post- | (4240 TCID50) |
| | infection) | |
| 7 | Day 1: IT 100 μL 6 mg/ | Day 1: IN 100 μL CA07 |
| | kgAC002564 (8 hours | (4240 TCID50) |
| | post-infection) | |

[0506] CA07 dose was quantified in TCID50 (50% tissue culture infective dose). This TCID50 dose was determined to be the optimal sub-lethal dose in accordance with the CA07 mouse model described in Example 3, above.

[0507] On Day 7, the animals were sacrificed. Lungs (both left and right) were collected and harvested. Expression of mouse H1N1 and M1 in lung was determined using qPCR, with 18s rRNA as endogenous control gene. Average H1N1 and M1 expression for each animal in lung tissue was normalized relative to Group 2 (no RNAi agent+CA07 infection). Results are shown in Table 65 below.

TABLE 65
Average relative expression of H1N1 and M1 in mice lung of Example 30.

| | Avg | | | Avg | | |
|---|---|---|---|---|---|---|
| Group ID | H1N1 | Low | High | M1 | Low | High |
| 1. Saline + PBS | N/A | N/A | N/A | N/A | N/A | N/A |
| 2. Saline (4 h post CA07) + | 1.000 | 0.180 | 0.425 | 1.000 | 0.114 | 0.288 |
| CA07 | | | | | | |
| 3. Saline (8 h post CA07) + | 0.903 | 0.285 | 0.416 | 1.101 | 0.304 | 0.419 |
| CA07 | | | | | | |
| 4. 3 mg/kg AC002564 (4 h | 0.308 | 0.113 | 0.178 | 0.476 | 0.173 | 0.272 |
| post CA07) + CA07 | | | | | | |
| 5. 6 mg/kg AC002564 (4 h | 0.219 | 0.096 | 0.172 | 0.311 | 0.111 | 0.172 |
| post CA07) + CA07 | | | | | | |
| 6. 3 mg/kg AC002564 (8 h | 0.214 | 0.054 | 0.073 | 0.320 | 0.117 | 0.185 |
| post CA07) + CA07 | | | | | | |
| 7. 6 mg/kg AC002564 (8 h | 0.283 | 0.123 | 0.218 | 0.362 | 0.161 | 0.289 |
| post CA07) + CA07 | | | | | | |

[0508] Each of Groups 4-7 showed reductions in H1N1 and in M1.

### Example 31. In Vivo Administration of IAV RNAi Agents to Mice Subsequently Infected with CA07 H1N1

[0509] Female C57Bl/6 mice animals were dosed with IAV RNAi agents and subsequently infected with CA07, in accordance with Example 4 (“CA07 H1N1 model mice”). On Day 1, four (n=4) mice (for Group 1) and five (n=5) mice (for Groups 2-8) were dosed with either saline or IAV RNAi agent formulated in saline (at 0.75 mg/kg), via intratracheal (IT) administration. On Day 8, the animals were dosed with either PBS or CA07 H1N1 formulated in PBS, via intranasal (IN) injection. Dosing was in accordance with Table 66 below.

TABLE 66
Dosing for mice animals of Example 31.

| Group | Dose (RNAi Agent) | Dose (CA07) |
|---|---|---|
| 1 | Day 1 and 3: IT 50 μL | Day 1: IN 100 μL PBS |
| | Saline | |
| 2 | Day 1 and 3: IT 50 μL | Day 1: IN 100 μL CA07 |
| | Saline | (4240 TCID50) |
| 3 | Day 1 and 3: IT 50 μL | Day 1: IN 100 μL CA07 |
| | 0.75 mg/kg AC002601 | (4240 TCID50) |
| 4 | Day 1 and 3: IT 50 μL | Day 1: IN 100 μL CA07 |
| | 0.75 mg/kg AC002928 | (4240 TCID50) |
| 5 | Day 1 and 3: IT 50 μL | Day 1: IN 100 μL CA07 |
| | 0.75 mg/kg AC002929 | (4240 TCID50) |
| 6 | Day 1 and 3: IT 50 μL | Day 1: IN 100 μL CA07 |
| | 0.75 mg/kg AC002930 | (4240 TCID50) |
| 7 | Day 1 and 3: IT 50 μL | Day 1: IN 100 μL CA07 |
| | 0.75 mg/kg AC002931 | (4240 TCID50) |
| 8 | Day 1 and 3: IT 50 μL | Day 1: IN 100 μL CA07 |
| | 0.75 mg/kg AC002927 | (4240 TCID50) |

[0510] CA07 dose was quantified in TCID50 (50% tissue culture infective dose). This TCID50 dose was determined to be the optimal sub-lethal dose in accordance with the CA07 mouse model described in Example 3, above.

[0511] On Day 14, the animals were sacrificed. Lungs (both left and right) were collected and harvested. Expression of mouse H1N1 and M1 in lung was determined using qPCR, with 18s rRNA as endogenous control gene. Average H1N1 and M1 expression for each animal in lung tissue was normalized relative to Group 2 (no RNAi agent+CA07 infection). Results are shown in Table 67 below.

TABLE 67
Average relative expression of H1N1 and M1 in mice lung of Example 31.

| | Avg | | | Avg | | |
|---|---|---|---|---|---|---|
| Group ID | H1N1 | Low | High | M1 | Low | High |
| 1. Saline + PBS | N/A | N/A | N/A | N/A | N/A | N/A |
| 2. Saline + CA07 | 1.000 | 0.297 | 0.422 | 1.000 | 0.278 | 0.384 |
| 3. 0.75 mg/kg AC002601 + | 0.176 | 0.088 | 0.175 | 0.246 | 0.128 | 0.266 |
| CA07 | | | | | | |
| 4. 0.75 mg/kg AC002928 + | 0.398 | 0.249 | 0.669 | 0.390 | 0.217 | 0.491 |
| CA07 | | | | | | |
| 5. 0.75 mg/kg AC002929 + | 0.334 | 0.130 | 0.213 | 0.316 | 0.130 | 0.222 |
| CA07 | | | | | | |
| 6. 0.75 mg/kg AC002930 + | 0.373 | 0.125 | 0.189 | 0.260 | 0.071 | 0.098 |
| CA07 | | | | | | |
| 7. 0.75 mg/kg AC002931 + | 0.564 | 0.201 | 0.312 | 0.372 | 0.186 | 0.372 |
| CA07 | | | | | | |
| 8. 0.75 mg/kg AC002927 + | 0.235 | 0.085 | 0.134 | 0.220 | 0.078 | 0.121 |
| CA07 | | | | | | |

[0512] Groups 3-8 each showed reductions in H1N1 and in M1.

### Example 32. In Vivo Administration of IAV RNAi Agents to Mice Previously Infected with CA07 H1N1

[0513] Female C57Bl/6 mice animals were infected with CA07 and then subsequently dosed with IAV RNAi agents, in accordance with Example 4 (“CA07 H1N1 model mice”). On Day 1, five (n=5) mice (for Group 1) and ten (n=10) mice (for Groups 2-5) were dosed with either saline or IAV RNAi agent formulated in saline (at 3 mg/kg), or Oseltamivir (Tamiflu®; at 20 mg/kg) (Group 5 dosed on Day 1, 2, 3, 4, 5), via intranasal (IN) administration or oral gavage. Prior to dosing with IAV RNAi agents, on Day 1, the animals were dosed with either PBS or CA07 H1N1 formulated in PBS, via intranasal (IN) injection. Dosing was in accordance with Table 68 below.

TABLE 68
Dosing for mice animals of Example 32.

| Group | Dose (RNAi Agent) | Dose (CA07) |
|---|---|---|
| 1 | Day 1 (4 hr & 8 hr post | Day 1: IN |
| | PBS infection): IN 50 μL | 100 μL PBS |
| | Saline | |
| 2 | Day 1 (4 hr & 8 hr post | Day 1: IN |
| | CA07 infection): IN 50 μL | 100 μL CA07 |
| | Saline | (4240 TCID50) |
| 3 | Day 1 (4 hr & 8 hr post | Day 1: IN |
| | CA07 infection): IN 50 μL | 100 μL CA07 |
| | 3 mg/kg AC002866 | (4240 TCID50) |
| 4 | Day 1 (4 hr & 8 hr post | Day 1: IN |
| | CA07 infection): IN 50 μL | 100 μL CA07 |
| | 3 mg/kg AC002869 | (4240 TCID50) |
| 5 | Day 1 (4 hr post CA07 | Day 1: IN |
| | infection), 2, 3, 4, 5: | 100 μL CA07 |
| | oral gavage 20 mg/kg | (4240 TCID50) |
| | Oseltamivir (Tamiflu ®) | |

[0514] CA07 dose was quantified in TCID50 (50% tissue culture infective dose). This TCID50 dose was determined to be the optimal sub-lethal dose in accordance with the CA07 mouse model described in Example 3, above.

[0515] On Day 7, the animals were sacrificed. Lungs (both left and right) were collected and harvested. Expression of mouse H1N1 (measuring genomic RNA) and M1 (measuring mRNA reductions) in lung was determined using qPCR, with 18s rRNA as endogenous control gene. Average H1N1 and M1 expression for each animal in lung tissue was normalized relative to Group 2 (no RNAi agent+CA07 infection). Results are shown in Table 69 below.

TABLE 69
Average relative expression of H1N1 (genomic RNA) and M1
(mRNA) in mice lung of Example 32.

| | Avg | | | Avg | | |
|---|---|---|---|---|---|---|
| Group ID | H1N1 | Low | High | M1 | Low | High |
| 1. Saline + PBS | N/A | N/A | N/A | N/A | N/A | N/A |
| 2. Saline + CA07 | 1.000 | 0.511 | 1.044 | 1.000 | 0.425 | 0.739 |
| 3. 3 mg/kg AC002866 + CA07 | 0.185 | 0.037 | 0.046 | 0.224 | 0.047 | 0.059 |
| 4. 3 mg/kg AC002869 + CA07 | 0.179 | 0.047 | 0.064 | 0.205 | 0.055 | 0.075 |
| 5. 20 mg/kg oseltamivir | 1.147 | 0.381 | 0.571 | 1.185 | 0.398 | 0.600 |
| (Tamiflu ®) + CA07 | | | | | | |

[0516] Groups 3 and 4 with an IAV RNAi agent dosed showed substantial reductions in H1N1 and in M1 of greater than or equal to approximately 80%, particularly when compared to commercially available oseltamivir (Tamiflu®) which showed no reductions in either H1N1 or M1 and was generally comparable to model mice administered saline.

[0517] CA07 H1N1 viral load was quantified in the mice animal lungs. FIG. 3 shows the viral load of the test animals' lung at Day 7 sacrifice. IAV RNAi agent AC002869 reduced lung viral load by approximately 2 log₁₀ TCID50/mL. In comparison, the Group dosed only with oseltamivir reduced lung viral load by less than 1 log₁₀ TCID50/mL.

[0518] Mice test animal lungs were prepared for H&E staining, IHC staining, and RNA scope. Mice test animal lung samples were processed, and paraffin embedded (formalin-fixed paraffin-embedded FFPE). Sections of the lung were collected using a microtome, and mounted on slides. Histological inflammation assay was performed on the slides using an automated IHC stainer (Ventana Discovery Ultra), detected by DAB-chromogenic; the inflammation assay utilized an antibody pan-inflammation marker to detect all inflamed cells, Iba1 (Wako, Cat #: 019-19741, 1:400), secondary from Roche (DISC. OmniMap anti-Rb HRP, Cat #: 05269679001), and visual detection by chromogenic from Roche (DISC. ChromoMap DAB, Cat #: 05266645001) to detect all the inflammation cells. The lung samples were scanned using Olympus VS2000 auto scanner for image analysis. The images were then loaded onto image analysis software, Halo-Indica Lab, using the cell detection module to detect the inflamed cells (Iba1+cells).

[0519] Inflammation of the test animal lungs was quantified, and the % of inflammation of the test groups was normalized to Group 2 Saline+CA07, the results are shown in FIG. 4. As shown in FIG. 4, RNAi agent AC002869 reduced lung inflammation by approximately 50%, compared to an approximately 36% reduction with oseltamivir treatment. FIG. 5 further shows histology of the mice test animal lungs, showing IAV RNAi agent AC002869 achieved reduction of inflammation in the mice test animal lungs.

### Example 33. In Vivo Administration of IAV RNAi Agents to Mice Subsequently Infected with CA07 H1N1

[0520] Female C57Bl/6 mice animals were dosed with IAV RNAi agents and subsequently infected with CA07, in accordance with Example 4 (“CA07 H1N1 model mice”). On Day 1 and 3 (for Groups 1-4), Day 3+4+5+6+7 (for Group 5), ten (n=10) mice (for Groups 1-5) were dosed with either saline or IAV RNAi agent formulated in saline (at 3 mg/kg), or Oseltamivir (Tamiflu®; at 40 mg/kg), via intranasal (IN) administration or oral gavage. On Day 8, the animals were dosed with either PBS or CA07 H1N1 formulated in PBS, via intranasal (IN) injection. Dosing was in accordance with Table 70 below.

TABLE 70
Dosing for mice animals of Example 33.

| Group | Dose (RNAi Agent) | Dose (CA07) |
|---|---|---|
| 1 | Day 1 and 3: IN 50 μL | Day 8: IN |
| | Saline | 100 μL PBS |
| 2 | Day 1 and 3: IN 50 μL | Day 8: IN |
| | Saline | 100 μL CA07 |
| | | (12000 TCID50) |
| 3 | Day 1 and 3: IN 50 μL | Day 8: IN |
| | 3 mg/kg AC002866 | 100 μL CA07 |
| | | (12000 TCID50) |
| 4 | Day 1 and 3: IN 50 μL | Day 8: IN |
| | 3 mg/kg AC002869 | 100 μL CA07 |
| | | (12000 TCID50) |
| 5 | Day 3 (2x), 4 (2x), 5 (2x), | Day 8: IN |
| | 6 (2x), 7 (2x): oral gavage | 100 μL CA07 |
| | 20 mg/kg Oseltamivir (Tamiflu ®) | (12000 TCID50) |

[0521] CA07 dose was quantified in TCID50 (50% tissue culture infective dose).

[0522] On Day 15, the animals were sacrificed. Mice were observed for body weight and survival rates post CA07 infection. Survival rate is determined upon sacrificing any test animal that loses more than 20% of initial body weight (>20% body weight loss=test animal death). The survival rates are shown in Table 71 below.

TABLE 71
Survival rates of test animals post CA07 infection of Example 33.

| Group ID | % Survival |
|---|---|
| 1. Saline + PBS | 100% 15 days post infection |
| 2. Saline + CA07 (12000 TCID50) | 90% 6 days post infection |
| | 40% 7 days post infection |
| | 10% 8 days post infection |
| | 10% 15 days post infection |
| 3. AC002866 + CA07 (12000 TCID50) | 100% 15 days post infection |
| 4. AC002869 + CA07 (12000 TCID50) | 100% 15 days post infection |
| 5. Oseltamivir (Tamiflu ®) + CA07 | 90% 6 days post infection |
| (12000 TCID50) | 80% 7 days post infection |
| | 30% 8 days post infection |
| | 20% 9 days post infection |
| | 20% 15 days post infection |

[0523] Dosing with IAV RNAi agents AC002866 or AC002869, followed by subsequent infection with CA07 (12000 TCID50), achieved 100% survival rate at 15 days post infection (Groups 3 and 4). Test animals dosed with saline followed by subsequent infection with CA07 (12000 TCID50) showed only a 10% survival rate at Day 8 post infection (Group 2). Similarly, test animals dosed with oseltamivir (Tamiflu®) showed only a 20% survival rate at 15 days post infection (Group 5). IAV RNAi agents AC002866 and AC002869 thus achieved reductions of mortality by ˜90% compared to the saline-treated Group infected with CA07 and reductions of mortality by ˜80% compared to the oseltamivir (Tamiflu®) treated Group.

### Example 34. In Vivo Administration of IAV RNAi Agents to Infected Mice with CA07 H1N1

[0524] Female C57Bl/6 mice animals were infected with CA07 and then subsequently dosed IAV RNAi agents, in accordance with Example 4 (“CA07 H1N1 model mice”). On Day 1, ten (n=10) mice in each Group were dosed with either saline or IAV RNAi agent formulated in saline (at 3 mg/kg), or Oseltamivir (Tamiflu®; at 40 mg/kg), via intranasal (IN) administration or oral gavage, in accordance with the dosing in Table 72 below.

TABLE 72
Dosing for mice animals of Example 34.

| Group | Dose (RNAi Agent) | Dose (CA07) |
|---|---|---|
| 1 | Day 1 (4 hours post infection | Day 1: IN |
| | & 8 hours post infection): | 100 μL PBS |
| | IN 50 μL Saline | |
| 2 | Day 1 (4 hours post infection | Day 1: IN |
| | & 8 hours post infection): | 100 μL CA07 |
| | IN 50 μL Saline | (12000 TCID50) |
| 3 | Day 1 (4 hours post infection | Day 1: IN |
| | & 8 hours post infection): | 100 μL CA07 |
| | IN 50 μL 3 mg/kg AC002866 | (12000 TCID50) |
| 4 | Day 1 (4 hours post infection | Day 1: IN |
| | & 8 hours post infection): | 100 μL CA07 |
| | IN 50 μL 3 mg/kg AC002869 | (12000 TCID50) |
| 5 | Day 1 (2x), Day 2 (2x), Day | Day 1: IN |
| | 3 (2x), Day 4 (2x), Day 5 (2x): | 100 μL CA07 |
| | oral gavage 40 mg/kg Oseltamivir | (12000 TCID50) |
| | (Tamiflu ®) (2 doses daily; 400 | |
| | mg/kg total dosed over 5 days) | |

[0525] CA07 dose was quantified in TCID5 (500% tissue culture infective dose).

[0526] On Day 15, the animals were sacrificed. Mice were observed for body weight and survival rates post CA07 infection. Survival rate is determined upon sacrificing any test animal that loses more than 200% of initial body weight (>20% body weight loss=test animal death). The survival rates are shown in Table 73 below.

TABLE 73
Survival rates of test animals post CA07 infection of Example 34.

| Group ID | % Survival |
|---|---|
| 1. Saline + PBS | 100% 14 days post infection |
| | (i.e., Day 15) |
| 2. Saline + CA07 | 90% 6 days post infection |
| (12000 TCID50) | 50% 7 days post infection |
| | 10% 8 days post infection |
| | 10% 14 days post infection |
| 3. AC002866 + CA07 | 90% 6 days post infection |
| (12000 TCID50) | 80% 7 days post infection |
| | 40% 8 days post infection |
| | 30% 9 days post infection |
| | 20% 10 days post infection |
| | 20% 14 days post infection |
| 4. AC002869 + CA07 | 70% 7 days post infection |
| (12000 TCID50) | 60% 8 days post infection |
| | 60% 14 days post infection |
| 5. Oseltamivir | 70% 7 days post infection |
| (Tamiflu ®) + CA07 | 20% 8 days post infection |
| (12000 TCID50) | 10% 9 days post infection |
| | 10% 14 days post infection |

[0527] Dosing with therapeutics after first infecting the animals presents a more severe model of IAV infection. As described in Table 73 above, infecting with CA07 (12000 TCID50) and subsequently dosing with IAV RNAi agents AC002866 or AC002869 achieved improved survival rates over the groups dosed with either oseltamivir or with no treatment. Test animals infected with CA07 (12000 TCID50) and subsequently administered with saline showed only a 10% survival rate at Day 8 and Day 14 post infection (Group 2). Similarly, test animals dosed with oseltamivir (Tamiflu®) showed only a 20% survival rate at Day 8 post infection (Group 5) and a 10% survival rate at Day 14 post infection. Comparatively, the Group dosed with RNAi agent AD002869 after infection with CA07, which targets the M1 influenza A genomic segment, showed 60% survival rate at 2 weeks post-infection.

### Example 35. Identification of Conserved RNAi Agent Sequences Across Influenza A Subtypes and Assessment of Viral Vulnerability

[0528] In order to identify the RNAi agent sequences disclosed in the various Examples described herein, approximately 10,000 influenza genomes of different subtypes, including H1N1, H3N2, H5N1, H5N6, H5N8, H7N2, H7N3, H7N4, H7N7, H7N9 and H9N2, were bioinformatically evaluated to locate the most highly conserved regions. By utilizing RNAi agents with sequences able to target conserved regions across different influenza genome subtypes, an RNAi agent therapeutic would be able to provide a therapeutic benefit to patients suffering from various influenza subtypes and therefore be able to address a larger set of patients.

[0529] For the RNAi agents described herein, as described elsewhere herein candidate sequences that target these highly conserved regions were identified in six genomic segments: PB1, PB2, PA, NP, NS, and M (which is referred to herein as M1, but includes the transcripts for M1 and M2). Genomic segments HA and NA were not evaluated due to the high genetic variation in these regions across different subtypes.

[0530] As described in the various Examples herein, throughout various evaluations of RNAi agents, the IAV RNAi agents that targeted the influenza A M1 genomic segments (i.e., targeting the influenza A genomic segment transcript of SEQ ID NO:1) consistently exhibited the most significant antiviral activity as compared to IAV RNAi agents that targeted other genomic segments.

### Example 36. In Vivo Administration of IAV RNAi Agents to Mice Infected with H5N1

[0531] Female C57Bl/6 mice animals first dosed with IAV RNAi agents, and were subsequently then infected with H5N1 IAV virus. Different groups of female C57Bl/6 mice animals were also dosed with IAV RNAi agents after H5N1 virus infection. On Day −7 and −5, ten (n=10) mice in Groups 3-4 were dosed with IAV RNAi agent formulated in saline (at 3 mg/kg), via intranasal (IN) or intratracheal (IT) administration; five (n=5) mice in Group 1 and ten (n=10) animals in Group 2 were dosed IN with saline. On Day 0, Groups 2-5 were dosed with H5N1 virus via intranasal (IN) administration. On Day 0, at 4 hours and 8 hours post H5N1 administration, ten (n=10) mice in Group 5 were dosed with IAV RNAi agent formulated in saline (at 3 mg/kg) via intranasal (IN) administration. Group 1 test animals were dosed IN with PBS and no H5N1. H5N1 dose was quantified in PFU (plaque forming unit). The dosing was in accordance with Table 74 below.

TABLE 74
Dosing for mice animals of Example 36.

| | | | Animals |
|---|---|---|---|
| Group | Dose (RNAi Agent) | Dose (H5N1) | (n=) |
| 1 | Day −7, Day −5: IN Saline | Day 0: IN 100 μL PBS | n = 5 |
| 2 | Day −7, Day −5: IN Saline | Day 0: IN H5N1 | n = 10 |
| | | (500 PFU in 25 μl) | |
| 3 | Day −7, Day −5: IT 25 μL | Day 0: IN H5N1 | n = 10 |
| | 3 mg/kg AC002869 | (500 PFU in 25 μl) | |
| 4 | Day −7, Day −5: IN 25 μL | Day 0: IN H5N1 | n = 10 |
| | 3 mg/kg AC002869 | (500 PFU in 25 μl) | |
| 5 | Day 0 4 hr and 8 hr after | Day 0: IN H5N1 | n = 10 |
| | H5N1 dose: IN 25 μL | (500 PFU in 25 μl) | |
| | 3 mg/kg AC002869 | | |

[0532] The administered H5N1 virus is of Influenza A Virus (A/Viet Nam/1203/2004(H5N1)).

[0533] All mice test animals were sacrificed on Day 5 (5 days post infection). Daily body weight measurement was collected. Lungs were collected, to quantify and analyze for lung viral load through PFU/TCID50, and lung histopathology.

TABLE 75
Lung viral load in mice test animals, of Example 36.

| | Mean | Mean log10 |
|---|---|---|
| Groups | PFU/lobe | PFU/lobe |
| Group 1 Saline + PBS | N/A | N/A |
| Group 2 Saline + H5N1 | 5.1E+06 | 6.4 |
| Group 3 AC002869 IT + H5N1 | 1.3E+04 | 3.9 |
| Group 4 AC002869 IN + H5N1 | 1.7E+04 | 3.3 |
| Group 5 AC002869 IN + H5N1 | 9.7E+03 | 3.8 |

[0534] Lung viral load, quantified at PFU/lobe, is shown in Table 75 and FIG. 6A. In the mice test animals, prophylactic treatment using IAV RNAi agent AC002869, followed by H5N1 infection, showed significant reduction in lung viral load. Prophylactic treatment using AC002869, via IT (Group 3) and IN (Group 4), both achieved significant reduction in lung viral load in comparison with test animals dosed with saline (Group 2). Additionally, therapeutic treatment using AC002869 following H5N1 infection, Group 5, also showed significant reduction in lung viral load in comparison with test animals dosed with saline (Group 2). Groups 3-5 all showed approximately a 10²-fold or 2 log 10-fold reduction in lung viral load, in comparison with test animals dosed with saline (Group 2). Following analysis of variance, Tukey's honest significant difference HSD test showed p values of p<0.01 for each Group 2 vs. Group 3, Group 2 vs. Group 4, and Group 2 vs. Group 5 (denoted as ** p<0.01).

[0535] Mice test animals' weight was collected and shown in the following Table 76, as well as FIG. 6B.

TABLE 76
% body weight test animals dosed with IAV RNAi agents, of Example 36.

| | Group 1 | | Group 2 | | Group 3 | | Group 4 | | Group 5 | |
|---|---|---|---|---|---|---|---|---|---|---|
| | Saline + | | Saline + | | AC002869 | | AC002869 | | AC002869 | |
| | PBS | | H5N1 | | IT + H5N1 | | IN + H5N1 | | IN + H5N1 | |
| Day | Mean | SEM | Mean | SEM | Mean | SEM | Mean | SEM | Mean | SEM |
| 0 | 100.000 | 1.410 | 100.000 | 2.430 | 100.000 | 1.627 | 100.000 | 1.593 | 100.000 | 2.344 |
| 1 | 98.942 | 1.321 | 99.204 | 2.444 | 98.602 | 1.525 | 98.380 | 1.751 | 95.976 | 2.122 |
| 2 | 98.558 | 1.836 | 94.033 | 2.432 | 98.312 | 1.487 | 97.523 | 1.936 | 95.282 | 2.041 |
| 3 | 98.269 | 1.793 | 84.088 | 2.112 | 90.887 | 1.296 | 91.091 | 1.909 | 89.870 | 1.993 |
| 4 | 99.327 | 1.638 | 79.612 | 2.056 | 90.839 | 1.839 | 91.663 | 1.918 | 89.732 | 1.930 |
| 5 | 100.481 | 1.723 | 76.479 | 2.044 | 94.359 | 1.580 | 95.569 | 1.963 | 91.304 | 1.992 |

[0536] As shown in Table 76 and FIG. 6B, following H5N1 infection, mice test animals treated with AC002869 showed improved weight change in comparison with test animals treated with saline (Group 2). Prophylactic treatment using AC002869, via IT (Group 3) and IN (Group 4), both achieved significantly improved weight change in comparison with test animals dosed with saline (Group 2). Group 3 and Group 4 both achieved approximately 94-95% weight retention in comparison with test animals dosed with saline (Group 2, approximately 76%). Additionally, therapeutic treatment using AC002869 following H5N1 infection, Group 5, also showed significant improvement in weight retention of approximately 91% in comparison with test animals dosed with saline (Group 2, approximately 76%).

[0537] “Clinical Score” was also observed for the mice test animals. For this study, Clinical Scores are defined as:
[0538] 0=normal;
[0539] 1=questionable illness;
[0540] 2=mild but definitive illness;
[0541] 3=moderate to severe illness;
[0542] 4=distinctly severe illness, moribund—euthanized; and
[0543] 5=found dead.

[0544] The Clinical Scores of the mice test animals are shown in FIG. 6C. All test Groups 3-5 treated with IAV RNAi agent AC002869, either before (Groups 3 and 4, prophylactic) or after (Group 5, therapeutic) H5N1 infection, via either intranasal (Groups 4 and 5) or intratracheal administration (Group 3), showed significantly improved clinical scores in comparison with test animals dosed with saline (Group 2). After H5N1 infection, Groups 3-5 test animals showed similar clinical scores as that of Group 1 test animals not dosed with H5N1 virus, maintaining 0 clinical score out to 5 days post H5N1 infection.

[0545] The above experimental data and results demonstrate the IAV RNAi agent AC002869 described herein also has potent antiviral activity against the H5N1 variant of the influenza A virus, as AC002869 is designed to exhibit antiviral activity targeted at highly conserved regions of the influenza A virus (specifically, AC002869 targets M1). Additionally, IAV RNAi agent AC002869 shows both prophylactic as well as therapeutic antiviral activity against H5N1. Accordingly, IAV RNAi agent AC002869, as well as other IAV RNAi agents described herein, is capable of potent antiviral activity across different influenza subtypes and therefore offer patients more therapeutic benefit.

### Example 37. In Vivo Administration of IAV RNAi Agents to Mice Infected with H5N1

[0546] Female Balb/c mice animals first dosed with IAV RNAi agents, and were subsequently then infected with H5N1 IAV virus. Different groups of female Balb/c mice animals were also dosed with IAV RNAi agents after H5N1 virus infection. On Day −7 and −5, ten (n=10) mice in Group 3 were dosed with IAV RNAi agent AC002869 formulated in saline (at 3 mg/kg), via intranasal (IN) administration; ten (n=10) mice in Group 1 and Group 2 were dosed IN with saline. On Day 0, Groups 2-4 were dosed with H5N1 virus via intranasal (IN) administration. On Day 0, at 4 hours and 8 hours post H5N1 administration, ten (n=10) mice in Group 4 were dosed with IAV RNAi agent formulated in saline (at 3 mg/kg) via intranasal (IN) administration. Group 1 test animals were dosed IN with PBS and no H5N1. H5N1 dose was quantified in TCID50 (50% tissue culture infective dose). The dosing was in accordance with Table 77 below.

TABLE 77
Dosing for mice animals of Example 37.

| | | | Animals |
|---|---|---|---|
| Group | Dose (RNAi Agent) | Dose (H5N1) | (n=) |
| 1 | Day −7, Day −5: IN Saline | Day 0: IN PBS | n = 10 |
| 2 | Day −7, Day −5: IN 25 μl | Day 0: IN H5N1 | n = 10 |
| | Saline | (500 TCID50) | |
| 3 | Day −7, Day −5: IN 25 μl | Day 0: IN H5N1 | n = 10 |
| | 3 mg/kg AC002869 | (500 TCID50) | |
| 4 | Day 0 4 hr and 8 hr after | Day 0: IN H5N1 | n = 10 |
| | H5N1 dose: IN 25 μl | (500 TCID50) | |
| | 3 mg/kg AC002869 | | |

[0547] The administered H5N1 virus is of Influenza A Virus (A/whooper swan/Mongolia/244/2005(H5N1)).

[0548] All mice test animals were sacrificed on Day 14 (14 days post H5N1 infection). Daily body weight measurement was collected. Lungs were collected, to quantify and analyze for lung viral load through PFU/TCID50, and lung histopathology.

[0549] FIG. 7A shows the mice test animals weight at time points before H5N1 infection. The IAV RNAi agent AC002869 does not appear to cause significant side effects that affect animal weight.

[0550] FIG. 7B shows the mice test animals weight at time points after H5N1 infection. Test animals of Group 2, administered saline (no IAV RNAi agent) and infected with H5N1, all succumbed to H5N1 infection. Test animals of Group 3, treated on Day −7 and −5 with IAV RNAi agent AC002869 and infected with H5N1, showed weight loss at Day 5-10, but recovered to ˜100% of starting body weight by Day 12-14. Test animals of Group 4, treated with IAV RNAi agent AC002869 at 4 and 8 hours post H5N1 infection, showed greater body weight loss compared to Group 3, after a brief period of recovery between Day 10 and 11, but still improved body weight loss in comparison to Group 2.

[0551] Clinical score is also observed for the mice test animals. For this study, Clinical Scores are defined as:
[0552] 1=healthy;
[0553] 2=ruffled fur, panting, lethargic (triggers 2nd observation);
[0554] 3=a score of 2 plus 1 additional clinical sign such as, hunched posture, orbital tightening, increased respiratory rate, or >15% weight loss (trigger 3rd observation);
[0555] 4=dyspnea and/or cyanosis, reluctance to move when stimulated or >25% weight loss−immediate euthanasia

[0556] FIG. 7C shows the clinical scores of the mice test animals. Test animals of Group 3 (treated with IAV RNAi agent AC002869 before H5N1) and Group 4 (treated with IAV RNAi agent AC002869 after H5N1) both showed improved clinical scores in comparison to Group 2 test animals (treated with no IAV RNAi agent and infected with H5N1). Group 4 showed improved clinical scores in comparison with Group 3. This shows both prophylactic as well as therapeutic treatment with AC002869 show improved clinical scores in comparison to Group 2 (treated with saline and no IAV RNAi agent), while AC002869 prophylactic treatment show better clinical scores than that of therapeutic treatment. Group 3 test animals showed clinical scores of healthy (score=1) starting at Day 12.

[0557] FIG. 7D shows the survival index of the test animals. All animals of Group 2, treated with no IAV RNAi agent and infected with H5N1, showed 100% mortality by Day 10. At Day 14, Group 3 (prophylactic treatment AC002869) showed 60% survival, while Group 4 (therapeutic treatment AC002869) showed 80% survival. Both prophylactic treatment (Group 3), as well as therapeutic treatment (Group 4) via IAV RNAi agent AC002869 showed significant improvement in mortality, at 60% and 80%, respectively, in comparison to Group 2 treated with no IAV RNAi agent.

[0558] FIG. 7E shows the lung viral load in TCID50. In the mice test animals, prophylactic and therapeutic treatment of H5N1 using IAV RNAi agent AC002869, showed significant reduction in lung viral load. Prophylactic treatment Group 3 and therapeutic treatment Group 4 both achieved significant antiviral activity in lung, reducing H5N1 lung viral load by ˜1.5 log 10, in comparison to test animals dosed with no IAV RNAi agent (Group 2). Significance is denoted as ** p<0.01.

[0559] The above experimental data and results demonstrate the IAV RNAi agent AC002869 described herein also has potent antiviral activity against the H5N1 variant of the influenza A virus, as AC002869 is designed to exhibit antiviral activity targeted at highly conserved regions of the influenza A virus (specifically, AC002869 targets M1). Additionally, IAV RNAi agent AC002869 shows both prophylactic as well as therapeutic antiviral activity against H5N1. Accordingly, IAV RNAi agent AC002869, as well as other IAV RNAi agents described herein, is capable of potent antiviral activity across different influenza subtypes and therefore offer patients more therapeutic benefit.

### Other Embodiments

[0560] It is to be understood that while the invention has been described in conjunction with the detailed description thereof, the foregoing description is intended to illustrate and not limit the scope of the invention, which is defined by the scope of the appended claims. Other aspects, advantages, and modifications are within the scope of the following claims.

The application's sequence listing, which the Patent Office published only in electronic form, follows.

SEQUENCE LISTING (1772 sequences)

SEQ ID NO: 1 - RNA, 982 nt, Influenza A Virus
  source 1..982: mol_type = viral cRNA
atgagtcttctaaccgaggtcgaaacgtacgttctttctatcatcccgtcaggccccctcaaagccgagatcgcgcagagactggaaagtgtctttgcaggaaagaacacagatcttgaggctctcatggaatggctaaagacaagaccaatcttgtcacctctgactaagggaattttaggatttgtgttcacgctcaccgtgcccagtgagcgaggactgcagcgtagacgctttgtccaaaatgccctaaatgggaatggggacccgaacaacatggatagagcagttaaactatacaagaagctcaaaagagaaataacgttccatggggccaaggaggtgtcactaagctattcaactggtgcacttgccagttgcatgggcctcatatacaacaggatgggaacagtgaccacagaagctgcttttggtctagtgtgtgccacttgtgaacagattgctgattcacagcatcggtctcacagacagatggctactaccaccaatccactaatcaggcatgaaaacagaatggtgctggctagcactacggcaaaggctatggaacagatggctggatcgagtgaacaggcagcggaggccatggaggttgctaatcagactaggcagatggtacatgcaatgagaactattgggactcatcctagctccagtgctggtctgaaagatgaccttcttgaaaatttgcaggcctaccagaagcgaatgggagtgcagatgcagcgattcaagtgatcctctcgtcattgcagcaaatatcattgggatcttgcacctgatattgtggattactgatcgtctttttttcaaatgtatttatcgtcgctttaaatacggtttgaaaagagggccttctacggaaggagtgcctgagtccatgagggaagaatatcaacaggaacagcagagtgctgtggatgttgacgatggtcattttgtcaacatagagctagagtaa

SEQ ID NO: 2 - RNA, 863 nt, Influenza A Virus
  source 1..863: mol_type = viral cRNA
atggactccaacaccatgtcaagctttcaggtagactgtttcctttggcatatccgcaagcgatttgcagacaatggattgggtgatgccccattccttgatcggctccgccgagatcaaaagtccttaaaaggaagaggcaacacccttggcctcgatatcgaaacagccactcttgttgggaaacaaatcgtggaatggatcttgaaagaggaatccagcgagacacttagaatgacaattgcatctgtacctacttcgcgctacctttctgacatgaccctcgaggaaatgtcacgagactggttcatgctcatgcctaggcaaaagataataggccctctttgcgtgcgattggaccaggcgatcatggaaaagaacatagtactgaaagcgaacttcagtgtaatctttaaccgattagagaccttgatactactaagggctttcactgaggagggagcaatagttggagaaatttcaccattaccttctcttccaggacatacttatgaggatgtcaaaaatgcagttggggtcctcatcggaggacttgaatggaatggtaacacggttcgagtctctgaaaatatacagagattcgcttggagaaactgtgatgagaatgggagaccttcactacctccagagcagaaatgaaaagtggcgagagcaattgggacagaaatttgaggaaataaggtggttaattgaagaaatgcggcacagattgaaagcgacagagaatagtttcgaacaaataacatttatgcaagccttacaactactgcttgaagtagaacaagagataagagctttctcgtttcagcttatttaatgataaaaaacacccttgtttctac

SEQ ID NO: 3 - RNA, 2274 nt, Influenza A Virus
  source 1..2274: mol_type = viral cRNA
atggatgtcaatccgactctacttttcctaaaaattccagcgcaaaatgccataagcaccacattcccttatactggagatcctccatacagccatggaacaggaacaggatacaccatggacacagtaaacagaacacaccaatactcagaaaagggaaagtggacgacaaacacagagactggtgcaccccagctcaacccgattgatggaccactacctgaggataatgaaccaagtgggtatgcacaaacagactgtgttctagaggctatggctttccttgaagaatcccacccaggaatatttgagaattcatgccttgaaacaatggaagttgttcaacaaacaagggtagataaactaactcaaggtcgccagacttatgattggacattaaacagaaatcaaccggcagcaactgcattggccaacaccatagaagtctttagatcgaatggcctaacagctaatgagtcaggaaggctaatagatttcttaaaggatgtaatggaatcaatgaacaaagaggaaatagagataacaacccactttcaaagaaaaaggagagtaagagacaacatgaccaagaagatggtcacgcaaagaacaatagggaagaaaaaacaaagactgaataagagaggctatctaataagagcactgacattaaatacgatgaccaaagatgcagagagaggcaagttaaaaagaagggctatcgcaacacctgggatgcagattagaggtttcgtatactttgttgaaactttagctaggagcatttgcgaaaagcttgaacagtctgggctcccagtagggggcaatgaaaagaaggccaaactggcaaatgttgtgagaaagatgatgactaattcacaagacacagagatttctttcacaatcactggggacaacactaagtggaatgaaaatcaaaatcctcgaatgttcctggcgatgattacatatatcaccagaaatcaacccgagtggttcagaaacatcctgagcatggcacccataatgttctcaaacaaaatggcaagactagggaaagggtacatgttcgagagtaaaagaatgaagattcgaacacaaataccagcagaaatgctagcaagcattgacctgaagtacttcaatgaatcaacaaagaagaaaattgagaaaataaggcctcttctaatagatggcacagcatcactgagtcctgggatgatgatgggcatgttcaacatgctaagtacggtcttgggagtctcgatactgaatcttggacaaaagaaatacaccaagacaatatactggtgggatgggctccaatcatccgacgattttgctctcatagtgaatgcaccaaaccatgagggaatacaagcaggagtggacagattctacaggacctgcaagttagtgggaatcaacatgagcaaaaagaagtcctatataaataagacagggacatttgaattcacaagctttttttatcgctatggatttgtggctaattttagcatggagctacccagctttggagtgtctggagtaaatgaatcagctgacatgagtattggagtaacagtgataaagaacaacatgataaacaatgaccttggacctgcaacggcccagatggctcttcaattgttcatcaaagactacagatacacatataggtgccataggggagacacacaaattcagacgagaagatcatttgagttaaagaagctgtgggatcaaacccaatcaaaggtagggctattagtatcagatggaggaccaaacttatacaatatacggaatcttcacattcctgaagtctgcttaaaatgggagctaatggatgatgattatcggggaagactttgtaatcccctgaatccctttgtcagtcataaagagattgattctgtaaacaatgctgtggtaatgccagcccatggtccagccaaaagcatggaatatgatgccgttgcaactacacattcctggattcccaagaggaatcgttctattctcaacacaagccaaaggggaattcttgaggatgaacagatgtaccagaagtgctgcaatctattcgagaaatttttccctagcagttcatataggagaccggttggaatttctagcatggtggaggccatggtgtctagggcccggattgatgccagggtcgacttcgagtctggacggatcaagaaagaagagttctctgagatcatgaagatctgttccaccattgaagaactcagacggcaaaaataa

SEQ ID NO: 4 - RNA, 2280 nt, Influenza A Virus
  source 1..2280: mol_type = viral cRNA
atggagagaataaaagaactgagagatctaatgtcgcagtcccgcactcgcgagatactcactaagaccactgtggaccatatggccataatcaaaaagtacacatcaggaaggcaagagaagaaccccgcactcagaatgaagtggatgatggcaatgagatacccaattacagcagacaagagaataatggacatgattccagagaggaatgaacaaggacaaaccctctggagcaaaacaaacgatgctggatcagaccgagtgatggtatcacctctggccgtaacatggtggaataggaatggcccaacaacaagtacagttcattaccctaaggtatataaaacttatttcgaaaaggtcgaaaggttgaaacatggtaccttcggccctgtccacttcagaaatcaagttaaaataaggaggagagttgatacaaaccctggccatgcagatctcagtgccaaggaggcacaggatgtgattatggaagttgttttcccaaatgaagtgggggcaagaatactgacatcagagtcacagctggcaataacaaaagagaagaaagaagagctccaggattgtaaaattgctcccttgatggtggcgtacatgctagaaagagaattggtccgtaaaacaaggtttctcccagtagccggcggaacaggcagtgtttatattgaagtgttgcacttaacccaagggacgtgctgggagcagatgtacactccaggaggagaagtgagaaatgatgatgttgaccaaagtttgattatcgctgctagaaacatagtaagaagagcagcagtgtcagcagacccattagcatctctcttggaaatgtgccacagcacacagattggaggagtaaggatggtggacatccttagacagaatccaactgaggaacaagccgtagacatatgcaaggcagcaatagggttgaggattagctcatctttcagttttggtgggttcactttcaaaaggacaagcggatcatcagtcaagaaagaagaagaagtgctaacgggcaacctccaaacactgaaaataagagtacatgaagggtatgaagaattcacaatggttgggagaagagcaacagctattctcagaaaggcaaccaggagattgatccagttgatagtaagcgggagagacgagcagtcaattgctgaggcaataattgtggccatggtattctcacaggaggattgcatgatcaaggcagttaggggcgatctgaactttgtcaatagggcaaaccagcgactgaaccccatgcaccaactcttgaggcatttccaaaaagatgcaaaagtgcttttccagaactggggaattgaatccatcgacaatgtgatgggaatgatcggaatactgcccgacatgaccccaagcacggagatgtcgctgagagggataagagtcagcaaaatgggagtagatgaatactccagcacggagagagtggtagtgagtattgaccgatttttaagggttagagatcaaagagggaacgtactattgtctcccgaagaagtcagtgaaacgcaaggaactgagaagttgacaataacttattcgtcatcaatgatgtgggagatcaatggccctgagtcagtgctagtcaacacttatcaatggataatcaggaactgggaaattgtgaaaattcaatggtcacaagatcccacaatgttatacaacaaaatggaatttgaaccatttcagtctcttgtccctaaggcaaccagaagccggtacagtggattcgtaaggacactgttccagcaaatgcgggatgtgcttgggacatttgacactgtccaaataataaaacttctcccctttgctgctgccccaccagaacagagtaggatgcaattttcctcattgactgtgaatgtgagaggatcagggttgaggatactggtaagaggcaattctccagtattcaattacaacaaggcaaccaaacgacttacagttcttggaaaggatgcaggtgcattgactgaagatccagatgaaggcacatctggggtggagtctgctgtcctgagaggatttctcattttgggcaaagaagacaagagatatggcccagcattaagcatcaatgaactgagcaatcttgcaaaaggagagaaggctaatgtgctaattgggcaaggggacgtagtgttggtaatgaaacgaaaacgggactctagcatacttactgacagccagacagcgaccaaaagaattcggatggccatcaattag

SEQ ID NO: 5 - RNA, 1497 nt, Influenza A Virus
  source 1..1497: mol_type = viral cRNA
atggcgtctcaaggcaccaaacgatcatatgaacaaatggagactggtggggagcgccaggatgccacagaaatcagagcatctgtcggaagaatgattggtggaatcgggagattctacatccaaatgtgcactgaactcaaactcagtgattatgatggacgactaatccagaatagcataacaatagagaggatggtgctttctgcttttgatgagagaagaaataaatacctagaagagcatcccagtgctgggaaggaccctaagaaaacaggaggacccatatatagaagagtagacggaaagtggatgagagaactcatcctttatgacaaagragaaataaggagagtttggcgcctagcaaacaatggcgaagatgcaacagcaggtcttactcatatcatgatttggcattccaacctgaatgatgccacatatcagagaacaagagcgcttgttcgcaccggaatggatcccagaatgtgctctctaatgcaaggttcaacacttcccagaaggtctggtgccgcaggtgctgcggtgaaaggagttggaacaatagcaatggagttaatcagaatgatcaaacgtggaatcaatgaccgaaatttctggaggggtgaaaatggacgaaggacaagggttgcttatgaaagaatgtgcaatatcctcaaaggaaaatttcaaacagctgcccagagggcaatgatggatcaagtaagagaaagtcgaaacccaggaaacgctgagattgaagacctcattttcctggcacggtcagcactcattctgaggggatcagttgcacataaatcctgcctgcctgcttgtgtgtatgggcttgcagtagcaagtgggcatgactttgaaagggaagggtactcactggtcgggatagacccattcaaattactccaaaacagccaagtggtcagcctgatgagaccaaatgaaaacccagctcacaagagtcaattggtgtggatggcatgccactctgctgcatttgaagatttaagagtatcaagtttcataagaggaaagaaagtgattccaagaggaaagctttccacaagaggggtccagattgcttcaaatgagaatgtggaaaccatggactccaataccctggaactgagaagcagatactgggccataaggaccaggagtggaggaaataccaatcaacaaaaggcatccgcaggccagatcagtgtgcagcctacattctcagtgcagcggaatctcccttttgaaagagcaaccgttatggcagcattcagcgggaacaatgaaggacggacatccgacatgcgaacagaagttataagaatgatggaaagtgcaaagccagaagatttgtccttccaggggcggggagtcttcgagctctcggacgaaaaggcaacgaacccgatcgtgccttcctttgacatgagtaatgaagggtcttatttcttcggagacaatgcagaggagtatgacagttga

SEQ ID NO: 6 - RNA, 2151 nt, Influenza A Virus
  source 1..2151: mol_type = viral cRNA
atggaagactttgtgcgacaatgcttcaatccaatgatcgtcgagcttgcggraaaggcaatgaaagaatatggggaagatccgaaaatcgaaactaacaagtttgctgcaatatgcacacatttggaagtttgtttcatgtattcggatttccatttcatcgacgaacggggtgaatcaataattgtagaatctggtgacccgaatgcactattgaagcaccgatttgagataattgaaggaagagaccgaatcatggcctggacagtggtgaacagtatatgtaacacaacaggggtagagaagcctaaatttcttcctgatttgtatgattacaaagagaaccggttcattgaaattggagtaacacggagggaagtccacatatattacctagagaaagccaacaaaataaaatctgagaagacacacattcacatcttttcattcactggagaggagatggccaccaaagcggactacacccttgacgaagagagcagggcaagaatcaaaactaggcttttcactataagacaagaaatggccagtaggagtctatgggattcctttcgtcagtccgaaagaggcgaagagacaattgaagaaaaatttgagattacaggaactatgcgcaagcttgccgaccaaagtctcccaccgaacttccccagccttgaaaactttagagcctatgtagatggattcgagccgaacggctgcattgagggcaagctttcccaaatgtcaaaagaagtgaacgccaaaattgaaccattcttgaggacgacaccacgccccctcagattgcctgatgggcctctttgccatcagcggtcaaagttcctgctgatggatgctctgaaattaagtattgaagacccgagtcacgagggggagggaataccactatatgatgcaatcaaatgcatgaagacattctttggctggaaagagcctaacatagtcaaaccacatgagaaaggcataaatcccaattacctcatggcttggaagcaggtgctagcagagctacaggacattgaaaatgaagagaagatcccaaggacaaagaacatgaagagaacaagccaattgaagtgggcactcggtgaaaatatggcaccagaaaaagtagactttgatgactgcaaagatgttggagaccttaaacagtatgacagtgatgagccagagcccagatctctagcaagctgggtccaaaatgaattcaataaggcatgtgaattgactgattcaagctggatagaacttgatgaaataggagaagatgttgccccgattgaacatatcgcaagcatgaggaggaactattttacagcagaagtgtcccactgcagggctactgaatacataatgaagggagtgtacataaatacggccttgctcaatgcatcctgtgcagccatggatgactttcagctgatcccaatgataagcaaatgtaggaccaaagaaggaagacggaaaacaaacctgtatgggttcattataaaaggaaggtctcatttgagaaatgatactgatgtggtgaactttgtaagtatggagttctcactcactgacccgagactggagccacacaaatgggaaaaatactgtgttcttgaaataggagacatgctcttgaggactgcgataggccaagtgtcgaggcccatgttcctatatgtgagaaccaatggaacctccaagatcaagatgaaatggggcatggaaatgaggcgctgccttcttcagtctcttcagcagattgagagcatgattgaggccgagtcttctgtcaaagagaaagacatgaccaaggaattctttgaaaacaaatcggaaacatggccaatcggagagtcacccaggggagtggaggaaggctctattgggaaagtgtgcaggaccttactggcaaaatctgtattcaacagtctatatgcgtctccacaacttgaggggttttcggctgaatctagaaaattgcttctcattgttcaggcacttagggacaacctggaacctggaaccttcgatcttggggggctatatgaagcaatcgaggagtgcctgattaatgatccctgggttttgcttaatgcatcttggttcaactccttcctcacacatgcactgaagtag

SEQ ID NO: 7 - RNA, 19 nt, synthetic construct
  source 1..19: mol_type = other RNA
aaccgaggtcgaaacgtac

SEQ ID NO: 8 - RNA, 19 nt, synthetic construct
  source 1..19: mol_type = other RNA
gtacgttctttctatcatc

SEQ ID NO: 9 - RNA, 19 nt, synthetic construct
  source 1..19: mol_type = other RNA
acaagaccaatcttgtcac

SEQ ID NO: 10 - RNA, 19 nt, synthetic construct
  source 1..19: mol_type = other RNA
aatcttgtcacctctgact

SEQ ID NO: 11 - RNA, 19 nt, synthetic construct
  source 1..19: mol_type = other RNA
tcttgtcacctctgactaa

SEQ ID NO: 12 - RNA, 19 nt, synthetic construct
  source 1..19: mol_type = other RNA
cgaacaacatggatagagc

SEQ ID NO: 13 - RNA, 19 nt, synthetic construct
  source 1..19: mol_type = other RNA
caacatggatagagcagtt

SEQ ID NO: 14 - RNA, 19 nt, synthetic construct
  source 1..19: mol_type = other RNA
tcactaagctattcaactg

SEQ ID NO: 15 - RNA, 19 nt, synthetic construct
  source 1..19: mol_type = other RNA
caactggtgcacttgccag

SEQ ID NO: 16 - RNA, 19 nt, synthetic construct
  source 1..19: mol_type = other RNA
tgaccacagaagctgcttt

SEQ ID NO: 17 - RNA, 19 nt, synthetic construct
  source 1..19: mol_type = other RNA
accaatccactaatcaggc

SEQ ID NO: 18 - RNA, 19 nt, synthetic construct
  source 1..19: mol_type = other RNA
ctattgggactcatcctag

SEQ ID NO: 19 - RNA, 19 nt, synthetic construct
  source 1..19: mol_type = other RNA
tgacgatggtcattttgtc

SEQ ID NO: 20 - RNA, 19 nt, synthetic construct
  source 1..19: mol_type = other RNA
gacgatggtcattttgtca

SEQ ID NO: 21 - RNA, 19 nt, synthetic construct
  source 1..19: mol_type = other RNA
gatgccccattccttgatc

SEQ ID NO: 22 - RNA, 19 nt, synthetic construct
  source 1..19: mol_type = other RNA
atgccccattccttgatcg

SEQ ID NO: 23 - RNA, 19 nt, synthetic construct
  source 1..19: mol_type = other RNA
tgccccattccttgatcgg

SEQ ID NO: 24 - RNA, 19 nt, synthetic construct
  source 1..19: mol_type = other RNA
gaaacagccactcttgttg

SEQ ID NO: 25 - RNA, 19 nt, synthetic construct
  source 1..19: mol_type = other RNA
atcgtggaatggatcttga

SEQ ID NO: 26 - RNA, 19 nt, synthetic construct
  source 1..19: mol_type = other RNA
tcttgaaagaggaatccag

SEQ ID NO: 27 - RNA, 19 nt, synthetic construct
  source 1..19: mol_type = other RNA
gacaattgcatctgtacct

SEQ ID NO: 28 - RNA, 19 nt, synthetic construct
  source 1..19: mol_type = other RNA
gcatctgtacctacttcgc

SEQ ID NO: 29 - RNA, 19 nt, synthetic construct
  source 1..19: mol_type = other RNA
gagactggttcatgctcat

SEQ ID NO: 30 - RNA, 19 nt, synthetic construct
  source 1..19: mol_type = other RNA
gactggttcatgctcatgc

SEQ ID NO: 31 - RNA, 19 nt, synthetic construct
  source 1..19: mol_type = other RNA
tgaaagcgaacttcagtgt

SEQ ID NO: 32 - RNA, 19 nt, synthetic construct
  source 1..19: mol_type = other RNA
gaacttcagtgtaatcttt

SEQ ID NO: 33 - RNA, 19 nt, synthetic construct
  source 1..19: mol_type = other RNA
cgattagagaccttgatac

SEQ ID NO: 34 - RNA, 19 nt, synthetic construct
  source 1..19: mol_type = other RNA
actactaagggctttcact

SEQ ID NO: 35 - RNA, 19 nt, synthetic construct
  source 1..19: mol_type = other RNA
ctactaagggctttcactg

SEQ ID NO: 36 - RNA, 19 nt, synthetic construct
  source 1..19: mol_type = other RNA
tctcttccaggacatactt

SEQ ID NO: 37 - RNA, 19 nt, synthetic construct
  source 1..19: mol_type = other RNA
tgaggatgtcaaaaatgca

SEQ ID NO: 38 - RNA, 19 nt, synthetic construct
  source 1..19: mol_type = other RNA
tgtcaaaaatgcagttggg

SEQ ID NO: 39 - RNA, 19 nt, synthetic construct
  source 1..19: mol_type = other RNA
tgcagttggggtcctcatc

SEQ ID NO: 40 - RNA, 19 nt, synthetic construct
  source 1..19: mol_type = other RNA
catcggaggacttgaatgg

SEQ ID NO: 41 - RNA, 19 nt, synthetic construct
  source 1..19: mol_type = other RNA
atcggaggacttgaatgga

SEQ ID NO: 42 - RNA, 19 nt, synthetic construct
  source 1..19: mol_type = other RNA
tcggaggacttgaatggaa

SEQ ID NO: 43 - RNA, 19 nt, synthetic construct
  source 1..19: mol_type = other RNA
ggaggacttgaatggaatg

SEQ ID NO: 44 - RNA, 19 nt, synthetic construct
  source 1..19: mol_type = other RNA
gaggacttgaatggaatgg

SEQ ID NO: 45 - RNA, 19 nt, synthetic construct
  source 1..19: mol_type = other RNA
ttgaatggaatggtaacac

SEQ ID NO: 46 - RNA, 19 nt, synthetic construct
  source 1..19: mol_type = other RNA
atggtaacacggttcgagt

SEQ ID NO: 47 - RNA, 19 nt, synthetic construct
  source 1..19: mol_type = other RNA
gtaacacggttcgagtctc

SEQ ID NO: 48 - RNA, 19 nt, synthetic construct
  source 1..19: mol_type = other RNA
tacagagattcgcttggag

SEQ ID NO: 49 - RNA, 19 nt, synthetic construct
  source 1..19: mol_type = other RNA
gatgagaatgggagacctt

SEQ ID NO: 50 - RNA, 19 nt, synthetic construct
  source 1..19: mol_type = other RNA
gaatgggagaccttcacta

SEQ ID NO: 51 - RNA, 19 nt, synthetic construct
  source 1..19: mol_type = other RNA
gacagagaatagtttcgaa

SEQ ID NO: 52 - RNA, 19 nt, synthetic construct
  source 1..19: mol_type = other RNA
tatgcaagccttacaacta

SEQ ID NO: 53 - RNA, 19 nt, synthetic construct
  source 1..19: mol_type = other RNA
agataagagctttctcgtt

SEQ ID NO: 54 - RNA, 19 nt, synthetic construct
  source 1..19: mol_type = other RNA
ctttctcgtttcagcttat

SEQ ID NO: 55 - RNA, 19 nt, synthetic construct
  source 1..19: mol_type = other RNA
gccataagcaccacattcc

SEQ ID NO: 56 - RNA, 19 nt, synthetic construct
  source 1..19: mol_type = other RNA
accacattcccttatactg

SEQ ID NO: 57 - RNA, 19 nt, synthetic construct
  source 1..19: mol_type = other RNA
acagaacacaccaatactc

SEQ ID NO: 58 - RNA, 19 nt, synthetic construct
  source 1..19: mol_type = other RNA
atgccttgaaacaatggaa

SEQ ID NO: 59 - RNA, 19 nt, synthetic construct
  source 1..19: mol_type = other RNA
ccaacaccatagaagtctt

SEQ ID NO: 60 - RNA, 19 nt, synthetic construct
  source 1..19: mol_type = other RNA
gtaagagacaacatgacca

SEQ ID NO: 61 - RNA, 19 nt, synthetic construct
  source 1..19: mol_type = other RNA
gcagattagaggtttcgta

SEQ ID NO: 62 - RNA, 19 nt, synthetic construct
  source 1..19: mol_type = other RNA
gcatttgcgaaaagcttga

SEQ ID NO: 63 - RNA, 19 nt, synthetic construct
  source 1..19: mol_type = other RNA
cgaaaagcttgaacagtct

SEQ ID NO: 64 - RNA, 19 nt, synthetic construct
  source 1..19: mol_type = other RNA
actggggacaacactaagt

SEQ ID NO: 65 - RNA, 19 nt, synthetic construct
  source 1..19: mol_type = other RNA
caaaatggcaagactaggg

SEQ ID NO: 66 - RNA, 19 nt, synthetic construct
  source 1..19: mol_type = other RNA
agtcctgggatgatgatgg

SEQ ID NO: 67 - RNA, 19 nt, synthetic construct
  source 1..19: mol_type = other RNA
ggcatgttcaacatgctaa

SEQ ID NO: 68 - RNA, 19 nt, synthetic construct
  source 1..19: mol_type = other RNA
tctcgatactgaatcttgg

SEQ ID NO: 69 - RNA, 19 nt, synthetic construct
  source 1..19: mol_type = other RNA
ggagtggacagattctaca

SEQ ID NO: 70 - RNA, 19 nt, synthetic construct
  source 1..19: mol_type = other RNA
atttgtggctaattttagc

SEQ ID NO: 71 - RNA, 19 nt, synthetic construct
  source 1..19: mol_type = other RNA
gtgataaagaacaacatga

SEQ ID NO: 72 - RNA, 19 nt, synthetic construct
  source 1..19: mol_type = other RNA
gctcttcaattgttcatca

SEQ ID NO: 73 - RNA, 19 nt, synthetic construct
  source 1..19: mol_type = other RNA
gatggaggaccaaacttat

SEQ ID NO: 74 - RNA, 19 nt, synthetic construct
  source 1..19: mol_type = other RNA
aggatgaacagatgtacca

SEQ ID NO: 75 - RNA, 19 nt, synthetic construct
  source 1..19: mol_type = other RNA
ggaatttctagcatggtgg

SEQ ID NO: 76 - RNA, 19 nt, synthetic construct
  source 1..19: mol_type = other RNA
tcaagaaagaagagttctc

SEQ ID NO: 77 - RNA, 19 nt, synthetic construct
  source 1..19: mol_type = other RNA
agatcatgaagatctgttc

SEQ ID NO: 78 - RNA, 19 nt, synthetic construct
  source 1..19: mol_type = other RNA
atctgttccaccattgaag

SEQ ID NO: 79 - RNA, 19 nt, synthetic construct
  source 1..19: mol_type = other RNA
ccaccattgaagaactcag

SEQ ID NO: 80 - RNA, 19 nt, synthetic construct
  source 1..19: mol_type = other RNA
gagatactcactaagacca

SEQ ID NO: 81 - RNA, 19 nt, synthetic construct
  source 1..19: mol_type = other RNA
tcgaaaggttgaaacatgg

SEQ ID NO: 82 - RNA, 19 nt, synthetic construct
  source 1..19: mol_type = other RNA
atggtggcgtacatgctag

SEQ ID NO: 83 - RNA, 19 nt, synthetic construct
  source 1..19: mol_type = other RNA
gctgctagaaacatagtaa

SEQ ID NO: 84 - RNA, 19 nt, synthetic construct
  source 1..19: mol_type = other RNA
gacaagcggatcatcagtc

SEQ ID NO: 85 - RNA, 19 nt, synthetic construct
  source 1..19: mol_type = other RNA
gaggattgcatgatcaagg

SEQ ID NO: 86 - RNA, 19 nt, synthetic construct
  source 1..19: mol_type = other RNA
gtggtagtgagtattgacc

SEQ ID NO: 87 - RNA, 19 nt, synthetic construct
  source 1..19: mol_type = other RNA
agggaacgtactattgtct

SEQ ID NO: 88 - RNA, 19 nt, synthetic construct
  source 1..19: mol_type = other RNA
tgatgtgggagatcaatgg

SEQ ID NO: 89 - RNA, 19 nt, synthetic construct
  source 1..19: mol_type = other RNA
tcgtaaggacactgttcca

SEQ ID NO: 90 - RNA, 19 nt, synthetic construct
  source 1..19: mol_type = other RNA
cagtattcaattacaacaa

SEQ ID NO: 91 - RNA, 19 nt, synthetic construct
  source 1..19: mol_type = other RNA
gactctagcatacttactg

SEQ ID NO: 92 - RNA, 19 nt, synthetic construct
  source 1..19: mol_type = other RNA
gtcggaagaatgattggtg

SEQ ID NO: 93 - RNA, 19 nt, synthetic construct
  source 1..19: mol_type = other RNA
gactaatccagaatagcat

SEQ ID NO: 94 - RNA, 19 nt, synthetic construct
  source 1..19: mol_type = other RNA
agaggatggtgctttctgc

SEQ ID NO: 95 - RNA, 19 nt, synthetic construct
  source 1..19: mol_type = other RNA
actcatatcatgatttggc

SEQ ID NO: 96 - RNA, 19 nt, synthetic construct
  source 1..19: mol_type = other RNA
gaatgatgccacatatcag

SEQ ID NO: 97 - RNA, 19 nt, synthetic construct
  source 1..19: mol_type = other RNA
tctaatgcaaggttcaaca

SEQ ID NO: 98 - RNA, 19 nt, synthetic construct
  source 1..19: mol_type = other RNA
tcagaatgatcaaacgtgg

SEQ ID NO: 99 - RNA, 19 nt, synthetic construct
  source 1..19: mol_type = other RNA
caatgaccgaaatttctgg

SEQ ID NO: 100 - RNA, 19 nt, synthetic construct
  source 1..19: mol_type = other RNA
tgtgcaatatcctcaaagg

SEQ ID NO: 101 - RNA, 19 nt, synthetic construct
  source 1..19: mol_type = other RNA
ggtcagcactcattctgag

SEQ ID NO: 102 - RNA, 19 nt, synthetic construct
  source 1..19: mol_type = other RNA
atcagttgcacataaatcc

SEQ ID NO: 103 - RNA, 19 nt, synthetic construct
  source 1..19: mol_type = other RNA
tcacaagagtcaattggtg

SEQ ID NO: 104 - RNA, 19 nt, synthetic construct
  source 1..19: mol_type = other RNA
gtatcaagtttcataagag

SEQ ID NO: 105 - RNA, 19 nt, synthetic construct
  source 1..19: mol_type = other RNA
tgtgcagcctacattctca

SEQ ID NO: 106 - RNA, 19 nt, synthetic construct
  source 1..19: mol_type = other RNA
cttcctttgacatgagtaa

SEQ ID NO: 107 - RNA, 19 nt, synthetic construct
  source 1..19: mol_type = other RNA
aatgaagggtcttatttct

SEQ ID NO: 108 - RNA, 19 nt, synthetic construct
  source 1..19: mol_type = other RNA
ctttgtgcgacaatgcttc

SEQ ID NO: 109 - RNA, 19 nt, synthetic construct
  source 1..19: mol_type = other RNA
tattcggatttccatttca

SEQ ID NO: 110 - RNA, 19 nt, synthetic construct
  source 1..19: mol_type = other RNA
ggaagagaccgaatcatgg

SEQ ID NO: 111 - RNA, 19 nt, synthetic construct
  source 1..19: mol_type = other RNA
atcaaaactaggcttttca

SEQ ID NO: 112 - RNA, 19 nt, synthetic construct
  source 1..19: mol_type = other RNA
ctatgggattcctttcgtc

SEQ ID NO: 113 - RNA, 19 nt, synthetic construct
  source 1..19: mol_type = other RNA
ggcgaagagacaattgaag

SEQ ID NO: 114 - RNA, 19 nt, synthetic construct
  source 1..19: mol_type = other RNA
ctatgtagatggattcgag

SEQ ID NO: 115 - RNA, 19 nt, synthetic construct
  source 1..19: mol_type = other RNA
caagctttcccaaatgtca

SEQ ID NO: 116 - RNA, 19 nt, synthetic construct
  source 1..19: mol_type = other RNA
actatatgatgcaatcaaa

SEQ ID NO: 117 - RNA, 19 nt, synthetic construct
  source 1..19: mol_type = other RNA
caaagatgttggagacctt

SEQ ID NO: 118 - RNA, 19 nt, synthetic construct
  source 1..19: mol_type = other RNA
gctggatagaacttgatga

SEQ ID NO: 119 - RNA, 19 nt, synthetic construct
  source 1..19: mol_type = other RNA
cccaatgataagcaaatgt

SEQ ID NO: 120 - RNA, 19 nt, synthetic construct
  source 1..19: mol_type = other RNA
aggagtgcctgattaatga

SEQ ID NO: 121 - RNA, 19 nt, synthetic construct
  source 1..19: mol_type = other RNA
gtacgtttcgacctcggtt

SEQ ID NO: 122 - RNA, 19 nt, synthetic construct
  source 1..19: mol_type = other RNA
atacgtttcgacctcggtt

SEQ ID NO: 123 - RNA, 19 nt, synthetic construct
  source 1..19: mol_type = other RNA
ttacgtttcgacctcggtt

SEQ ID NO: 124 - RNA, 19 nt, synthetic construct
  source 1..19: mol_type = other RNA
ntacgtttcgacctcggtt

SEQ ID NO: 125 - RNA, 19 nt, synthetic construct
  source 1..19: mol_type = other RNA
ntacgtttcgacctcggtn

SEQ ID NO: 126 - RNA, 19 nt, synthetic construct
  source 1..19: mol_type = other RNA
gatgatagaaagaacgtac

SEQ ID NO: 127 - RNA, 19 nt, synthetic construct
  source 1..19: mol_type = other RNA
aatgatagaaagaacgtac

SEQ ID NO: 128 - RNA, 19 nt, synthetic construct
  source 1..19: mol_type = other RNA
tatgatagaaagaacgtac

SEQ ID NO: 129 - RNA, 19 nt, synthetic construct
  source 1..19: mol_type = other RNA
natgatagaaagaacgtac

SEQ ID NO: 130 - RNA, 19 nt, synthetic construct
  source 1..19: mol_type = other RNA
natgatagaaagaacgtan

SEQ ID NO: 131 - RNA, 19 nt, synthetic construct
  source 1..19: mol_type = other RNA
gtgacaagattggtcttgt

SEQ ID NO: 132 - RNA, 19 nt, synthetic construct
  source 1..19: mol_type = other RNA
atgacaagattggtcttgt

SEQ ID NO: 133 - RNA, 19 nt, synthetic construct
  source 1..19: mol_type = other RNA
ttgacaagattggtcttgt

SEQ ID NO: 134 - RNA, 19 nt, synthetic construct
  source 1..19: mol_type = other RNA
ntgacaagattggtcttgt

SEQ ID NO: 135 - RNA, 19 nt, synthetic construct
  source 1..19: mol_type = other RNA
ntgacaagattggtcttgn

SEQ ID NO: 136 - RNA, 19 nt, synthetic construct
  source 1..19: mol_type = other RNA
agtcagaggtgacaagatt

SEQ ID NO: 137 - RNA, 19 nt, synthetic construct
  source 1..19: mol_type = other RNA
tgtcagaggtgacaagatt

SEQ ID NO: 138 - RNA, 19 nt, synthetic construct
  source 1..19: mol_type = other RNA
ngtcagaggtgacaagatt

SEQ ID NO: 139 - RNA, 19 nt, synthetic construct
  source 1..19: mol_type = other RNA
ngtcagaggtgacaagatn

SEQ ID NO: 140 - RNA, 19 nt, synthetic construct
  source 1..19: mol_type = other RNA
ttagtcagaggtgacaaga

SEQ ID NO: 141 - RNA, 19 nt, synthetic construct
  source 1..19: mol_type = other RNA
atagtcagaggtgacaaga

SEQ ID NO: 142 - RNA, 19 nt, synthetic construct
  source 1..19: mol_type = other RNA
ntagtcagaggtgacaaga

SEQ ID NO: 143 - RNA, 19 nt, synthetic construct
  source 1..19: mol_type = other RNA
ntagtcagaggtgacaagn

SEQ ID NO: 144 - RNA, 19 nt, synthetic construct
  source 1..19: mol_type = other RNA
gctctatccatgttgttcg

SEQ ID NO: 145 - RNA, 19 nt, synthetic construct
  source 1..19: mol_type = other RNA
actctatccatgttgttcg

SEQ ID NO: 146 - RNA, 19 nt, synthetic construct
  source 1..19: mol_type = other RNA
tctctatccatgttgttcg

SEQ ID NO: 147 - RNA, 19 nt, synthetic construct
  source 1..19: mol_type = other RNA
nctctatccatgttgttcg

SEQ ID NO: 148 - RNA, 19 nt, synthetic construct
  source 1..19: mol_type = other RNA
nctctatccatgttgttcn

SEQ ID NO: 149 - RNA, 19 nt, synthetic construct
  source 1..19: mol_type = other RNA
aactgctctatccatgttg

SEQ ID NO: 150 - RNA, 19 nt, synthetic construct
  source 1..19: mol_type = other RNA
tactgctctatccatgttg

SEQ ID NO: 151 - RNA, 19 nt, synthetic construct
  source 1..19: mol_type = other RNA
nactgctctatccatgttg

SEQ ID NO: 152 - RNA, 19 nt, synthetic construct
  source 1..19: mol_type = other RNA
nactgctctatccatgttn

SEQ ID NO: 153 - RNA, 19 nt, synthetic construct
  source 1..19: mol_type = other RNA
cagttgaatagcttagtga

SEQ ID NO: 154 - RNA, 19 nt, synthetic construct
  source 1..19: mol_type = other RNA
aagttgaatagcttagtga

SEQ ID NO: 155 - RNA, 19 nt, synthetic construct
  source 1..19: mol_type = other RNA
tagttgaatagcttagtga

SEQ ID NO: 156 - RNA, 19 nt, synthetic construct
  source 1..19: mol_type = other RNA
nagttgaatagcttagtga

SEQ ID NO: 157 - RNA, 19 nt, synthetic construct
  source 1..19: mol_type = other RNA
nagttgaatagcttagtgn

SEQ ID NO: 158 - RNA, 19 nt, synthetic construct
  source 1..19: mol_type = other RNA
ctggcaagtgcaccagttg

SEQ ID NO: 159 - RNA, 19 nt, synthetic construct
  source 1..19: mol_type = other RNA
atggcaagtgcaccagttg

SEQ ID NO: 160 - RNA, 19 nt, synthetic construct
  source 1..19: mol_type = other RNA
ttggcaagtgcaccagttg

SEQ ID NO: 161 - RNA, 19 nt, synthetic construct
  source 1..19: mol_type = other RNA
ntggcaagtgcaccagttg

SEQ ID NO: 162 - RNA, 19 nt, synthetic construct
  source 1..19: mol_type = other RNA
ntggcaagtgcaccagttn

SEQ ID NO: 163 - RNA, 19 nt, synthetic construct
  source 1..19: mol_type = other RNA
aaagcagcttctgtggtca

SEQ ID NO: 164 - RNA, 19 nt, synthetic construct
  source 1..19: mol_type = other RNA
taagcagcttctgtggtca

SEQ ID NO: 165 - RNA, 19 nt, synthetic construct
  source 1..19: mol_type = other RNA
naagcagcttctgtggtca

SEQ ID NO: 166 - RNA, 19 nt, synthetic construct
  source 1..19: mol_type = other RNA
naagcagcttctgtggtcn

SEQ ID NO: 167 - RNA, 19 nt, synthetic construct
  source 1..19: mol_type = other RNA
gcctgattagtggattggt

SEQ ID NO: 168 - RNA, 19 nt, synthetic construct
  source 1..19: mol_type = other RNA
acctgattagtggattggt

SEQ ID NO: 169 - RNA, 19 nt, synthetic construct
  source 1..19: mol_type = other RNA
tcctgattagtggattggt

SEQ ID NO: 170 - RNA, 19 nt, synthetic construct
  source 1..19: mol_type = other RNA
ncctgattagtggattggt

SEQ ID NO: 171 - RNA, 19 nt, synthetic construct
  source 1..19: mol_type = other RNA
ncctgattagtggattggn

SEQ ID NO: 172 - RNA, 19 nt, synthetic construct
  source 1..19: mol_type = other RNA
ctaggatgagtcccaatag

SEQ ID NO: 173 - RNA, 19 nt, synthetic construct
  source 1..19: mol_type = other RNA
ataggatgagtcccaatag

SEQ ID NO: 174 - RNA, 19 nt, synthetic construct
  source 1..19: mol_type = other RNA
ttaggatgagtcccaatag

SEQ ID NO: 175 - RNA, 19 nt, synthetic construct
  source 1..19: mol_type = other RNA
ntaggatgagtcccaatag

SEQ ID NO: 176 - RNA, 19 nt, synthetic construct
  source 1..19: mol_type = other RNA
ntaggatgagtcccaatan

SEQ ID NO: 177 - RNA, 19 nt, synthetic construct
  source 1..19: mol_type = other RNA
gacaaaatgaccatcgtca

SEQ ID NO: 178 - RNA, 19 nt, synthetic construct
  source 1..19: mol_type = other RNA
aacaaaatgaccatcgtca

SEQ ID NO: 179 - RNA, 19 nt, synthetic construct
  source 1..19: mol_type = other RNA
tacaaaatgaccatcgtca

SEQ ID NO: 180 - RNA, 19 nt, synthetic construct
  source 1..19: mol_type = other RNA
nacaaaatgaccatcgtca

SEQ ID NO: 181 - RNA, 19 nt, synthetic construct
  source 1..19: mol_type = other RNA
nacaaaatgaccatcgtcn

SEQ ID NO: 182 - RNA, 19 nt, synthetic construct
  source 1..19: mol_type = other RNA
tgacaaaatgaccatcgtc

SEQ ID NO: 183 - RNA, 19 nt, synthetic construct
  source 1..19: mol_type = other RNA
agacaaaatgaccatcgtc

SEQ ID NO: 184 - RNA, 19 nt, synthetic construct
  source 1..19: mol_type = other RNA
ngacaaaatgaccatcgtc

SEQ ID NO: 185 - RNA, 19 nt, synthetic construct
  source 1..19: mol_type = other RNA
ngacaaaatgaccatcgtn

SEQ ID NO: 186 - RNA, 19 nt, synthetic construct
  source 1..19: mol_type = other RNA
gatcaaggaatggggcatc

SEQ ID NO: 187 - RNA, 19 nt, synthetic construct
  source 1..19: mol_type = other RNA
aatcaaggaatggggcatc

SEQ ID NO: 188 - RNA, 19 nt, synthetic construct
  source 1..19: mol_type = other RNA
tatcaaggaatggggcatc

SEQ ID NO: 189 - RNA, 19 nt, synthetic construct
  source 1..19: mol_type = other RNA
natcaaggaatggggcatc

SEQ ID NO: 190 - RNA, 19 nt, synthetic construct
  source 1..19: mol_type = other RNA
natcaaggaatggggcatn

SEQ ID NO: 191 - RNA, 19 nt, synthetic construct
  source 1..19: mol_type = other RNA
cgatcaaggaatggggcat

SEQ ID NO: 192 - RNA, 19 nt, synthetic construct
  source 1..19: mol_type = other RNA
agatcaaggaatggggcat

SEQ ID NO: 193 - RNA, 19 nt, synthetic construct
  source 1..19: mol_type = other RNA
tgatcaaggaatggggcat

SEQ ID NO: 194 - RNA, 19 nt, synthetic construct
  source 1..19: mol_type = other RNA
ngatcaaggaatggggcat

SEQ ID NO: 195 - RNA, 19 nt, synthetic construct
  source 1..19: mol_type = other RNA
ngatcaaggaatggggcan

SEQ ID NO: 196 - RNA, 19 nt, synthetic construct
  source 1..19: mol_type = other RNA
ccgatcaaggaatggggca

SEQ ID NO: 197 - RNA, 19 nt, synthetic construct
  source 1..19: mol_type = other RNA
acgatcaaggaatggggca

SEQ ID NO: 198 - RNA, 19 nt, synthetic construct
  source 1..19: mol_type = other RNA
tcgatcaaggaatggggca

SEQ ID NO: 199 - RNA, 19 nt, synthetic construct
  source 1..19: mol_type = other RNA
ncgatcaaggaatggggca

SEQ ID NO: 200 - RNA, 19 nt, synthetic construct
  source 1..19: mol_type = other RNA
ncgatcaaggaatggggcn

SEQ ID NO: 201 - RNA, 19 nt, synthetic construct
  source 1..19: mol_type = other RNA
caacaagagtggctgtttc

SEQ ID NO: 202 - RNA, 19 nt, synthetic construct
  source 1..19: mol_type = other RNA
aaacaagagtggctgtttc

SEQ ID NO: 203 - RNA, 19 nt, synthetic construct
  source 1..19: mol_type = other RNA
taacaagagtggctgtttc

SEQ ID NO: 204 - RNA, 19 nt, synthetic construct
  source 1..19: mol_type = other RNA
naacaagagtggctgtttc

SEQ ID NO: 205 - RNA, 19 nt, synthetic construct
  source 1..19: mol_type = other RNA
naacaagagtggctgtttn

SEQ ID NO: 206 - RNA, 19 nt, synthetic construct
  source 1..19: mol_type = other RNA
tcaagatccattccacgat

SEQ ID NO: 207 - RNA, 19 nt, synthetic construct
  source 1..19: mol_type = other RNA
acaagatccattccacgat

SEQ ID NO: 208 - RNA, 19 nt, synthetic construct
  source 1..19: mol_type = other RNA
ncaagatccattccacgat

SEQ ID NO: 209 - RNA, 19 nt, synthetic construct
  source 1..19: mol_type = other RNA
ncaagatccattccacgan

SEQ ID NO: 210 - RNA, 19 nt, synthetic construct
  source 1..19: mol_type = other RNA
ctggattcctctttcaaga

SEQ ID NO: 211 - RNA, 19 nt, synthetic construct
  source 1..19: mol_type = other RNA
atggattcctctttcaaga

SEQ ID NO: 212 - RNA, 19 nt, synthetic construct
  source 1..19: mol_type = other RNA
ttggattcctctttcaaga

SEQ ID NO: 213 - RNA, 19 nt, synthetic construct
  source 1..19: mol_type = other RNA
ntggattcctctttcaaga

SEQ ID NO: 214 - RNA, 19 nt, synthetic construct
  source 1..19: mol_type = other RNA
ntggattcctctttcaagn

SEQ ID NO: 215 - RNA, 19 nt, synthetic construct
  source 1..19: mol_type = other RNA
aggtacagatgcaattgtc

SEQ ID NO: 216 - RNA, 19 nt, synthetic construct
  source 1..19: mol_type = other RNA
tggtacagatgcaattgtc

SEQ ID NO: 217 - RNA, 19 nt, synthetic construct
  source 1..19: mol_type = other RNA
nggtacagatgcaattgtc

SEQ ID NO: 218 - RNA, 19 nt, synthetic construct
  source 1..19: mol_type = other RNA
nggtacagatgcaattgtn

SEQ ID NO: 219 - RNA, 19 nt, synthetic construct
  source 1..19: mol_type = other RNA
gcgaagtaggtacagatgc

SEQ ID NO: 220 - RNA, 19 nt, synthetic construct
  source 1..19: mol_type = other RNA
acgaagtaggtacagatgc

SEQ ID NO: 221 - RNA, 19 nt, synthetic construct
  source 1..19: mol_type = other RNA
tcgaagtaggtacagatgc

SEQ ID NO: 222 - RNA, 19 nt, synthetic construct
  source 1..19: mol_type = other RNA
ncgaagtaggtacagatgc

SEQ ID NO: 223 - RNA, 19 nt, synthetic construct
  source 1..19: mol_type = other RNA
ncgaagtaggtacagatgn

SEQ ID NO: 224 - RNA, 19 nt, synthetic construct
  source 1..19: mol_type = other RNA
atgagcatgaaccagtctc

SEQ ID NO: 225 - RNA, 19 nt, synthetic construct
  source 1..19: mol_type = other RNA
ttgagcatgaaccagtctc

SEQ ID NO: 226 - RNA, 19 nt, synthetic construct
  source 1..19: mol_type = other RNA
ntgagcatgaaccagtctc

SEQ ID NO: 227 - RNA, 19 nt, synthetic construct
  source 1..19: mol_type = other RNA
ntgagcatgaaccagtctn

SEQ ID NO: 228 - RNA, 19 nt, synthetic construct
  source 1..19: mol_type = other RNA
gcatgagcatgaaccagtc

SEQ ID NO: 229 - RNA, 19 nt, synthetic construct
  source 1..19: mol_type = other RNA
acatgagcatgaaccagtc

SEQ ID NO: 230 - RNA, 19 nt, synthetic construct
  source 1..19: mol_type = other RNA
tcatgagcatgaaccagtc

SEQ ID NO: 231 - RNA, 19 nt, synthetic construct
  source 1..19: mol_type = other RNA
ncatgagcatgaaccagtc

SEQ ID NO: 232 - RNA, 19 nt, synthetic construct
  source 1..19: mol_type = other RNA
ncatgagcatgaaccagtn

SEQ ID NO: 233 - RNA, 19 nt, synthetic construct
  source 1..19: mol_type = other RNA
acactgaagttcgctttca

SEQ ID NO: 234 - RNA, 19 nt, synthetic construct
  source 1..19: mol_type = other RNA
tcactgaagttcgctttca

SEQ ID NO: 235 - RNA, 19 nt, synthetic construct
  source 1..19: mol_type = other RNA
ncactgaagttcgctttca

SEQ ID NO: 236 - RNA, 19 nt, synthetic construct
  source 1..19: mol_type = other RNA
ncactgaagttcgctttcn

SEQ ID NO: 237 - RNA, 19 nt, synthetic construct
  source 1..19: mol_type = other RNA
aaagattacactgaagttc

SEQ ID NO: 238 - RNA, 19 nt, synthetic construct
  source 1..19: mol_type = other RNA
taagattacactgaagttc

SEQ ID NO: 239 - RNA, 19 nt, synthetic construct
  source 1..19: mol_type = other RNA
naagattacactgaagttc

SEQ ID NO: 240 - RNA, 19 nt, synthetic construct
  source 1..19: mol_type = other RNA
naagattacactgaagttn

SEQ ID NO: 241 - RNA, 19 nt, synthetic construct
  source 1..19: mol_type = other RNA
gtatcaaggtctctaatcg

SEQ ID NO: 242 - RNA, 19 nt, synthetic construct
  source 1..19: mol_type = other RNA
atatcaaggtctctaatcg

SEQ ID NO: 243 - RNA, 19 nt, synthetic construct
  source 1..19: mol_type = other RNA
ttatcaaggtctctaatcg

SEQ ID NO: 244 - RNA, 19 nt, synthetic construct
  source 1..19: mol_type = other RNA
ntatcaaggtctctaatcg

SEQ ID NO: 245 - RNA, 19 nt, synthetic construct
  source 1..19: mol_type = other RNA
ntatcaaggtctctaatcn

SEQ ID NO: 246 - RNA, 19 nt, synthetic construct
  source 1..19: mol_type = other RNA
agtgaaagcccttagtagt

SEQ ID NO: 247 - RNA, 19 nt, synthetic construct
  source 1..19: mol_type = other RNA
tgtgaaagcccttagtagt

SEQ ID NO: 248 - RNA, 19 nt, synthetic construct
  source 1..19: mol_type = other RNA
ngtgaaagcccttagtagt

SEQ ID NO: 249 - RNA, 19 nt, synthetic construct
  source 1..19: mol_type = other RNA
ngtgaaagcccttagtagn

SEQ ID NO: 250 - RNA, 19 nt, synthetic construct
  source 1..19: mol_type = other RNA
cagtgaaagcccttagtag

SEQ ID NO: 251 - RNA, 19 nt, synthetic construct
  source 1..19: mol_type = other RNA
aagtgaaagcccttagtag

SEQ ID NO: 252 - RNA, 19 nt, synthetic construct
  source 1..19: mol_type = other RNA
tagtgaaagcccttagtag

SEQ ID NO: 253 - RNA, 19 nt, synthetic construct
  source 1..19: mol_type = other RNA
nagtgaaagcccttagtag

SEQ ID NO: 254 - RNA, 19 nt, synthetic construct
  source 1..19: mol_type = other RNA
nagtgaaagcccttagtan

SEQ ID NO: 255 - RNA, 19 nt, synthetic construct
  source 1..19: mol_type = other RNA
aagtatgtcctggaagaga

SEQ ID NO: 256 - RNA, 19 nt, synthetic construct
  source 1..19: mol_type = other RNA
tagtatgtcctggaagaga

SEQ ID NO: 257 - RNA, 19 nt, synthetic construct
  source 1..19: mol_type = other RNA
nagtatgtcctggaagaga

SEQ ID NO: 258 - RNA, 19 nt, synthetic construct
  source 1..19: mol_type = other RNA
nagtatgtcctggaagagn

SEQ ID NO: 259 - RNA, 19 nt, synthetic construct
  source 1..19: mol_type = other RNA
tgcatttttgacatcctca

SEQ ID NO: 260 - RNA, 19 nt, synthetic construct
  source 1..19: mol_type = other RNA
agcatttttgacatcctca

SEQ ID NO: 261 - RNA, 19 nt, synthetic construct
  source 1..19: mol_type = other RNA
ngcatttttgacatcctca

SEQ ID NO: 262 - RNA, 19 nt, synthetic construct
  source 1..19: mol_type = other RNA
ngcatttttgacatcctcn

SEQ ID NO: 263 - RNA, 19 nt, synthetic construct
  source 1..19: mol_type = other RNA
cccaactgcatttttgaca

SEQ ID NO: 264 - RNA, 19 nt, synthetic construct
  source 1..19: mol_type = other RNA
accaactgcatttttgaca

SEQ ID NO: 265 - RNA, 19 nt, synthetic construct
  source 1..19: mol_type = other RNA
tccaactgcatttttgaca

SEQ ID NO: 266 - RNA, 19 nt, synthetic construct
  source 1..19: mol_type = other RNA
nccaactgcatttttgaca

SEQ ID NO: 267 - RNA, 19 nt, synthetic construct
  source 1..19: mol_type = other RNA
nccaactgcatttttgacn

SEQ ID NO: 268 - RNA, 19 nt, synthetic construct
  source 1..19: mol_type = other RNA
gatgaggaccccaactgca

SEQ ID NO: 269 - RNA, 19 nt, synthetic construct
  source 1..19: mol_type = other RNA
aatgaggaccccaactgca

SEQ ID NO: 270 - RNA, 19 nt, synthetic construct
  source 1..19: mol_type = other RNA
tatgaggaccccaactgca

SEQ ID NO: 271 - RNA, 19 nt, synthetic construct
  source 1..19: mol_type = other RNA
natgaggaccccaactgca

SEQ ID NO: 272 - RNA, 19 nt, synthetic construct
  source 1..19: mol_type = other RNA
natgaggaccccaactgcn

SEQ ID NO: 273 - RNA, 19 nt, synthetic construct
  source 1..19: mol_type = other RNA
ccattcaagtcctccgatg

SEQ ID NO: 274 - RNA, 19 nt, synthetic construct
  source 1..19: mol_type = other RNA
acattcaagtcctccgatg

SEQ ID NO: 275 - RNA, 19 nt, synthetic construct
  source 1..19: mol_type = other RNA
tcattcaagtcctccgatg

SEQ ID NO: 276 - RNA, 19 nt, synthetic construct
  source 1..19: mol_type = other RNA
ncattcaagtcctccgatg

SEQ ID NO: 277 - RNA, 19 nt, synthetic construct
  source 1..19: mol_type = other RNA
ncattcaagtcctccgatn

SEQ ID NO: 278 - RNA, 19 nt, synthetic construct
  source 1..19: mol_type = other RNA
tccattcaagtcctccgat

SEQ ID NO: 279 - RNA, 19 nt, synthetic construct
  source 1..19: mol_type = other RNA
accattcaagtcctccgat

SEQ ID NO: 280 - RNA, 19 nt, synthetic construct
  source 1..19: mol_type = other RNA
nccattcaagtcctccgat

SEQ ID NO: 281 - RNA, 19 nt, synthetic construct
  source 1..19: mol_type = other RNA
nccattcaagtcctccgan

SEQ ID NO: 282 - RNA, 19 nt, synthetic construct
  source 1..19: mol_type = other RNA
ttccattcaagtcctccga

SEQ ID NO: 283 - RNA, 19 nt, synthetic construct
  source 1..19: mol_type = other RNA
atccattcaagtcctccga

SEQ ID NO: 284 - RNA, 19 nt, synthetic construct
  source 1..19: mol_type = other RNA
ntccattcaagtcctccga

SEQ ID NO: 285 - RNA, 19 nt, synthetic construct
  source 1..19: mol_type = other RNA
ntccattcaagtcctccgn

SEQ ID NO: 286 - RNA, 19 nt, synthetic construct
  source 1..19: mol_type = other RNA
cattccattcaagtcctcc

SEQ ID NO: 287 - RNA, 19 nt, synthetic construct
  source 1..19: mol_type = other RNA
aattccattcaagtcctcc

SEQ ID NO: 288 - RNA, 19 nt, synthetic construct
  source 1..19: mol_type = other RNA
tattccattcaagtcctcc

SEQ ID NO: 289 - RNA, 19 nt, synthetic construct
  source 1..19: mol_type = other RNA
nattccattcaagtcctcc

SEQ ID NO: 290 - RNA, 19 nt, synthetic construct
  source 1..19: mol_type = other RNA
nattccattcaagtcctcn

SEQ ID NO: 291 - RNA, 19 nt, synthetic construct
  source 1..19: mol_type = other RNA
ccattccattcaagtcctc

SEQ ID NO: 292 - RNA, 19 nt, synthetic construct
  source 1..19: mol_type = other RNA
acattccattcaagtcctc

SEQ ID NO: 293 - RNA, 19 nt, synthetic construct
  source 1..19: mol_type = other RNA
tcattccattcaagtcctc

SEQ ID NO: 294 - RNA, 19 nt, synthetic construct
  source 1..19: mol_type = other RNA
ncattccattcaagtcctc

SEQ ID NO: 295 - RNA, 19 nt, synthetic construct
  source 1..19: mol_type = other RNA
ncattccattcaagtcctn

SEQ ID NO: 296 - RNA, 19 nt, synthetic construct
  source 1..19: mol_type = other RNA
gtgttaccattccattcaa

SEQ ID NO: 297 - RNA, 19 nt, synthetic construct
  source 1..19: mol_type = other RNA
atgttaccattccattcaa

SEQ ID NO: 298 - RNA, 19 nt, synthetic construct
  source 1..19: mol_type = other RNA
ttgttaccattccattcaa

SEQ ID NO: 299 - RNA, 19 nt, synthetic construct
  source 1..19: mol_type = other RNA
ntgttaccattccattcaa

SEQ ID NO: 300 - RNA, 19 nt, synthetic construct
  source 1..19: mol_type = other RNA
ntgttaccattccattcan

SEQ ID NO: 301 - RNA, 19 nt, synthetic construct
  source 1..19: mol_type = other RNA
actcgaaccgtgttaccat

SEQ ID NO: 302 - RNA, 19 nt, synthetic construct
  source 1..19: mol_type = other RNA
tctcgaaccgtgttaccat

SEQ ID NO: 303 - RNA, 19 nt, synthetic construct
  source 1..19: mol_type = other RNA
nctcgaaccgtgttaccat

SEQ ID NO: 304 - RNA, 19 nt, synthetic construct
  source 1..19: mol_type = other RNA
nctcgaaccgtgttaccan

SEQ ID NO: 305 - RNA, 19 nt, synthetic construct
  source 1..19: mol_type = other RNA
gagactcgaaccgtgttac

SEQ ID NO: 306 - RNA, 19 nt, synthetic construct
  source 1..19: mol_type = other RNA
aagactcgaaccgtgttac

SEQ ID NO: 307 - RNA, 19 nt, synthetic construct
  source 1..19: mol_type = other RNA
tagactcgaaccgtgttac

SEQ ID NO: 308 - RNA, 19 nt, synthetic construct
  source 1..19: mol_type = other RNA
nagactcgaaccgtgttac

SEQ ID NO: 309 - RNA, 19 nt, synthetic construct
  source 1..19: mol_type = other RNA
nagactcgaaccgtgttan

SEQ ID NO: 310 - RNA, 19 nt, synthetic construct
  source 1..19: mol_type = other RNA
ctccaagcgaatctctgta

SEQ ID NO: 311 - RNA, 19 nt, synthetic construct
  source 1..19: mol_type = other RNA
atccaagcgaatctctgta

SEQ ID NO: 312 - RNA, 19 nt, synthetic construct
  source 1..19: mol_type = other RNA
ttccaagcgaatctctgta

SEQ ID NO: 313 - RNA, 19 nt, synthetic construct
  source 1..19: mol_type = other RNA
ntccaagcgaatctctgta

SEQ ID NO: 314 - RNA, 19 nt, synthetic construct
  source 1..19: mol_type = other RNA
ntccaagcgaatctctgtn

SEQ ID NO: 315 - RNA, 19 nt, synthetic construct
  source 1..19: mol_type = other RNA
aaggtctcccattctcatc

SEQ ID NO: 316 - RNA, 19 nt, synthetic construct
  source 1..19: mol_type = other RNA
taggtctcccattctcatc

SEQ ID NO: 317 - RNA, 19 nt, synthetic construct
  source 1..19: mol_type = other RNA
naggtctcccattctcatc

SEQ ID NO: 318 - RNA, 19 nt, synthetic construct
  source 1..19: mol_type = other RNA
naggtctcccattctcatn

SEQ ID NO: 319 - RNA, 19 nt, synthetic construct
  source 1..19: mol_type = other RNA
tagtgaaggtctcccattc

SEQ ID NO: 320 - RNA, 19 nt, synthetic construct
  source 1..19: mol_type = other RNA
aagtgaaggtctcccattc

SEQ ID NO: 321 - RNA, 19 nt, synthetic construct
  source 1..19: mol_type = other RNA
nagtgaaggtctcccattc

SEQ ID NO: 322 - RNA, 19 nt, synthetic construct
  source 1..19: mol_type = other RNA
nagtgaaggtctcccattn

SEQ ID NO: 323 - RNA, 19 nt, synthetic construct
  source 1..19: mol_type = other RNA
ttcgaaactattctctgtc

SEQ ID NO: 324 - RNA, 19 nt, synthetic construct
  source 1..19: mol_type = other RNA
atcgaaactattctctgtc

SEQ ID NO: 325 - RNA, 19 nt, synthetic construct
  source 1..19: mol_type = other RNA
ntcgaaactattctctgtc

SEQ ID NO: 326 - RNA, 19 nt, synthetic construct
  source 1..19: mol_type = other RNA
ntcgaaactattctctgtn

SEQ ID NO: 327 - RNA, 19 nt, synthetic construct
  source 1..19: mol_type = other RNA
tagttgtaaggcttgcata

SEQ ID NO: 328 - RNA, 19 nt, synthetic construct
  source 1..19: mol_type = other RNA
aagttgtaaggcttgcata

SEQ ID NO: 329 - RNA, 19 nt, synthetic construct
  source 1..19: mol_type = other RNA
nagttgtaaggcttgcata

SEQ ID NO: 330 - RNA, 19 nt, synthetic construct
  source 1..19: mol_type = other RNA
nagttgtaaggcttgcatn

SEQ ID NO: 331 - RNA, 19 nt, synthetic construct
  source 1..19: mol_type = other RNA
aacgagaaagctcttatct

SEQ ID NO: 332 - RNA, 19 nt, synthetic construct
  source 1..19: mol_type = other RNA
tacgagaaagctcttatct

SEQ ID NO: 333 - RNA, 19 nt, synthetic construct
  source 1..19: mol_type = other RNA
nacgagaaagctcttatct

SEQ ID NO: 334 - RNA, 19 nt, synthetic construct
  source 1..19: mol_type = other RNA
nacgagaaagctcttatcn

SEQ ID NO: 335 - RNA, 19 nt, synthetic construct
  source 1..19: mol_type = other RNA
ataagctgaaacgagaaag

SEQ ID NO: 336 - RNA, 19 nt, synthetic construct
  source 1..19: mol_type = other RNA
ttaagctgaaacgagaaag

SEQ ID NO: 337 - RNA, 19 nt, synthetic construct
  source 1..19: mol_type = other RNA
ntaagctgaaacgagaaag

SEQ ID NO: 338 - RNA, 19 nt, synthetic construct
  source 1..19: mol_type = other RNA
ntaagctgaaacgagaaan

SEQ ID NO: 339 - RNA, 19 nt, synthetic construct
  source 1..19: mol_type = other RNA
ggaatgtggtgcttatggc

SEQ ID NO: 340 - RNA, 19 nt, synthetic construct
  source 1..19: mol_type = other RNA
agaatgtggtgcttatggc

SEQ ID NO: 341 - RNA, 19 nt, synthetic construct
  source 1..19: mol_type = other RNA
tgaatgtggtgcttatggc

SEQ ID NO: 342 - RNA, 19 nt, synthetic construct
  source 1..19: mol_type = other RNA
ngaatgtggtgcttatggc

SEQ ID NO: 343 - RNA, 19 nt, synthetic construct
  source 1..19: mol_type = other RNA
ngaatgtggtgcttatggn

SEQ ID NO: 344 - RNA, 19 nt, synthetic construct
  source 1..19: mol_type = other RNA
cagtataagggaatgtggt

SEQ ID NO: 345 - RNA, 19 nt, synthetic construct
  source 1..19: mol_type = other RNA
aagtataagggaatgtggt

SEQ ID NO: 346 - RNA, 19 nt, synthetic construct
  source 1..19: mol_type = other RNA
tagtataagggaatgtggt

SEQ ID NO: 347 - RNA, 19 nt, synthetic construct
  source 1..19: mol_type = other RNA
nagtataagggaatgtggt

SEQ ID NO: 348 - RNA, 19 nt, synthetic construct
  source 1..19: mol_type = other RNA
nagtataagggaatgtggn

SEQ ID NO: 349 - RNA, 19 nt, synthetic construct
  source 1..19: mol_type = other RNA
gagtattggtgtgttctgt

SEQ ID NO: 350 - RNA, 19 nt, synthetic construct
  source 1..19: mol_type = other RNA
aagtattggtgtgttctgt

SEQ ID NO: 351 - RNA, 19 nt, synthetic construct
  source 1..19: mol_type = other RNA
tagtattggtgtgttctgt

SEQ ID NO: 352 - RNA, 19 nt, synthetic construct
  source 1..19: mol_type = other RNA
nagtattggtgtgttctgt

SEQ ID NO: 353 - RNA, 19 nt, synthetic construct
  source 1..19: mol_type = other RNA
nagtattggtgtgttctgn

SEQ ID NO: 354 - RNA, 19 nt, synthetic construct
  source 1..19: mol_type = other RNA
ttccattgtttcaaggcat

SEQ ID NO: 355 - RNA, 19 nt, synthetic construct
  source 1..19: mol_type = other RNA
atccattgtttcaaggcat

SEQ ID NO: 356 - RNA, 19 nt, synthetic construct
  source 1..19: mol_type = other RNA
ntccattgtttcaaggcat

SEQ ID NO: 357 - RNA, 19 nt, synthetic construct
  source 1..19: mol_type = other RNA
ntccattgtttcaaggcan

SEQ ID NO: 358 - RNA, 19 nt, synthetic construct
  source 1..19: mol_type = other RNA
aagacttctatggtgttgg

SEQ ID NO: 359 - RNA, 19 nt, synthetic construct
  source 1..19: mol_type = other RNA
tagacttctatggtgttgg

SEQ ID NO: 360 - RNA, 19 nt, synthetic construct
  source 1..19: mol_type = other RNA
nagacttctatggtgttgg

SEQ ID NO: 361 - RNA, 19 nt, synthetic construct
  source 1..19: mol_type = other RNA
nagacttctatggtgttgn

SEQ ID NO: 362 - RNA, 19 nt, synthetic construct
  source 1..19: mol_type = other RNA
tggtcatgttgtctcttac

SEQ ID NO: 363 - RNA, 19 nt, synthetic construct
  source 1..19: mol_type = other RNA
aggtcatgttgtctcttac

SEQ ID NO: 364 - RNA, 19 nt, synthetic construct
  source 1..19: mol_type = other RNA
nggtcatgttgtctcttac

SEQ ID NO: 365 - RNA, 19 nt, synthetic construct
  source 1..19: mol_type = other RNA
nggtcatgttgtctcttan

SEQ ID NO: 366 - RNA, 19 nt, synthetic construct
  source 1..19: mol_type = other RNA
tacgaaacctctaatctgc

SEQ ID NO: 367 - RNA, 19 nt, synthetic construct
  source 1..19: mol_type = other RNA
aacgaaacctctaatctgc

SEQ ID NO: 368 - RNA, 19 nt, synthetic construct
  source 1..19: mol_type = other RNA
nacgaaacctctaatctgc

SEQ ID NO: 369 - RNA, 19 nt, synthetic construct
  source 1..19: mol_type = other RNA
nacgaaacctctaatctgn

SEQ ID NO: 370 - RNA, 19 nt, synthetic construct
  source 1..19: mol_type = other RNA
tcaagcttttcgcaaatgc

SEQ ID NO: 371 - RNA, 19 nt, synthetic construct
  source 1..19: mol_type = other RNA
acaagcttttcgcaaatgc

SEQ ID NO: 372 - RNA, 19 nt, synthetic construct
  source 1..19: mol_type = other RNA
ncaagcttttcgcaaatgc

SEQ ID NO: 373 - RNA, 19 nt, synthetic construct
  source 1..19: mol_type = other RNA
ncaagcttttcgcaaatgn

SEQ ID NO: 374 - RNA, 19 nt, synthetic construct
  source 1..19: mol_type = other RNA
agactgttcaagcttttcg

SEQ ID NO: 375 - RNA, 19 nt, synthetic construct
  source 1..19: mol_type = other RNA
tgactgttcaagcttttcg

SEQ ID NO: 376 - RNA, 19 nt, synthetic construct
  source 1..19: mol_type = other RNA
ngactgttcaagcttttcg

SEQ ID NO: 377 - RNA, 19 nt, synthetic construct
  source 1..19: mol_type = other RNA
ngactgttcaagcttttcn

SEQ ID NO: 378 - RNA, 19 nt, synthetic construct
  source 1..19: mol_type = other RNA
acttagtgttgtccccagt

SEQ ID NO: 379 - RNA, 19 nt, synthetic construct
  source 1..19: mol_type = other RNA
tcttagtgttgtccccagt

SEQ ID NO: 380 - RNA, 19 nt, synthetic construct
  source 1..19: mol_type = other RNA
ncttagtgttgtccccagt

SEQ ID NO: 381 - RNA, 19 nt, synthetic construct
  source 1..19: mol_type = other RNA
ncttagtgttgtccccagn

SEQ ID NO: 382 - RNA, 19 nt, synthetic construct
  source 1..19: mol_type = other RNA
ccctagtcttgccattttg

SEQ ID NO: 383 - RNA, 19 nt, synthetic construct
  source 1..19: mol_type = other RNA
acctagtcttgccattttg

SEQ ID NO: 384 - RNA, 19 nt, synthetic construct
  source 1..19: mol_type = other RNA
tcctagtcttgccattttg

SEQ ID NO: 385 - RNA, 19 nt, synthetic construct
  source 1..19: mol_type = other RNA
ncctagtcttgccattttg

SEQ ID NO: 386 - RNA, 19 nt, synthetic construct
  source 1..19: mol_type = other RNA
ncctagtcttgccattttn

SEQ ID NO: 387 - RNA, 19 nt, synthetic construct
  source 1..19: mol_type = other RNA
ccatcatcatcccaggact

SEQ ID NO: 388 - RNA, 19 nt, synthetic construct
  source 1..19: mol_type = other RNA
acatcatcatcccaggact

SEQ ID NO: 389 - RNA, 19 nt, synthetic construct
  source 1..19: mol_type = other RNA
tcatcatcatcccaggact

SEQ ID NO: 390 - RNA, 19 nt, synthetic construct
  source 1..19: mol_type = other RNA
ncatcatcatcccaggact

SEQ ID NO: 391 - RNA, 19 nt, synthetic construct
  source 1..19: mol_type = other RNA
ncatcatcatcccaggacn

SEQ ID NO: 392 - RNA, 19 nt, synthetic construct
  source 1..19: mol_type = other RNA
ttagcatgttgaacatgcc

SEQ ID NO: 393 - RNA, 19 nt, synthetic construct
  source 1..19: mol_type = other RNA
atagcatgttgaacatgcc

SEQ ID NO: 394 - RNA, 19 nt, synthetic construct
  source 1..19: mol_type = other RNA
ntagcatgttgaacatgcc

SEQ ID NO: 395 - RNA, 19 nt, synthetic construct
  source 1..19: mol_type = other RNA
ntagcatgttgaacatgcn

SEQ ID NO: 396 - RNA, 19 nt, synthetic construct
  source 1..19: mol_type = other RNA
ccaagattcagtatcgaga

SEQ ID NO: 397 - RNA, 19 nt, synthetic construct
  source 1..19: mol_type = other RNA
acaagattcagtatcgaga

SEQ ID NO: 398 - RNA, 19 nt, synthetic construct
  source 1..19: mol_type = other RNA
tcaagattcagtatcgaga

SEQ ID NO: 399 - RNA, 19 nt, synthetic construct
  source 1..19: mol_type = other RNA
ncaagattcagtatcgaga

SEQ ID NO: 400 - RNA, 19 nt, synthetic construct
  source 1..19: mol_type = other RNA
ncaagattcagtatcgagn

SEQ ID NO: 401 - RNA, 19 nt, synthetic construct
  source 1..19: mol_type = other RNA
tgtagaatctgtccactcc

SEQ ID NO: 402 - RNA, 19 nt, synthetic construct
  source 1..19: mol_type = other RNA
agtagaatctgtccactcc

SEQ ID NO: 403 - RNA, 19 nt, synthetic construct
  source 1..19: mol_type = other RNA
ngtagaatctgtccactcc

SEQ ID NO: 404 - RNA, 19 nt, synthetic construct
  source 1..19: mol_type = other RNA
ngtagaatctgtccactcn

SEQ ID NO: 405 - RNA, 19 nt, synthetic construct
  source 1..19: mol_type = other RNA
gctaaaattagccacaaat

SEQ ID NO: 406 - RNA, 19 nt, synthetic construct
  source 1..19: mol_type = other RNA
actaaaattagccacaaat

SEQ ID NO: 407 - RNA, 19 nt, synthetic construct
  source 1..19: mol_type = other RNA
tctaaaattagccacaaat

SEQ ID NO: 408 - RNA, 19 nt, synthetic construct
  source 1..19: mol_type = other RNA
nctaaaattagccacaaat

SEQ ID NO: 409 - RNA, 19 nt, synthetic construct
  source 1..19: mol_type = other RNA
nctaaaattagccacaaan

SEQ ID NO: 410 - RNA, 19 nt, synthetic construct
  source 1..19: mol_type = other RNA
tcatgttgttctttatcac

SEQ ID NO: 411 - RNA, 19 nt, synthetic construct
  source 1..19: mol_type = other RNA
acatgttgttctttatcac

SEQ ID NO: 412 - RNA, 19 nt, synthetic construct
  source 1..19: mol_type = other RNA
ncatgttgttctttatcac

SEQ ID NO: 413 - RNA, 19 nt, synthetic construct
  source 1..19: mol_type = other RNA
ncatgttgttctttatcan

SEQ ID NO: 414 - RNA, 19 nt, synthetic construct
  source 1..19: mol_type = other RNA
tgatgaacaattgaagagc

SEQ ID NO: 415 - RNA, 19 nt, synthetic construct
  source 1..19: mol_type = other RNA
agatgaacaattgaagagc

SEQ ID NO: 416 - RNA, 19 nt, synthetic construct
  source 1..19: mol_type = other RNA
ngatgaacaattgaagagc

SEQ ID NO: 417 - RNA, 19 nt, synthetic construct
  source 1..19: mol_type = other RNA
ngatgaacaattgaagagn

SEQ ID NO: 418 - RNA, 19 nt, synthetic construct
  source 1..19: mol_type = other RNA
ataagtttggtcctccatc

SEQ ID NO: 419 - RNA, 19 nt, synthetic construct
  source 1..19: mol_type = other RNA
ttaagtttggtcctccatc

SEQ ID NO: 420 - RNA, 19 nt, synthetic construct
  source 1..19: mol_type = other RNA
ntaagtttggtcctccatc

SEQ ID NO: 421 - RNA, 19 nt, synthetic construct
  source 1..19: mol_type = other RNA
ntaagtttggtcctccatn

SEQ ID NO: 422 - RNA, 19 nt, synthetic construct
  source 1..19: mol_type = other RNA
tggtacatctgttcatcct

SEQ ID NO: 423 - RNA, 19 nt, synthetic construct
  source 1..19: mol_type = other RNA
aggtacatctgttcatcct

SEQ ID NO: 424 - RNA, 19 nt, synthetic construct
  source 1..19: mol_type = other RNA
nggtacatctgttcatcct

SEQ ID NO: 425 - RNA, 19 nt, synthetic construct
  source 1..19: mol_type = other RNA
nggtacatctgttcatccn

SEQ ID NO: 426 - RNA, 19 nt, synthetic construct
  source 1..19: mol_type = other RNA
ccaccatgctagaaattcc

SEQ ID NO: 427 - RNA, 19 nt, synthetic construct
  source 1..19: mol_type = other RNA
acaccatgctagaaattcc

SEQ ID NO: 428 - RNA, 19 nt, synthetic construct
  source 1..19: mol_type = other RNA
tcaccatgctagaaattcc

SEQ ID NO: 429 - RNA, 19 nt, synthetic construct
  source 1..19: mol_type = other RNA
ncaccatgctagaaattcc

SEQ ID NO: 430 - RNA, 19 nt, synthetic construct
  source 1..19: mol_type = other RNA
ncaccatgctagaaattcn

SEQ ID NO: 431 - RNA, 19 nt, synthetic construct
  source 1..19: mol_type = other RNA
gagaactcttctttcttga

SEQ ID NO: 432 - RNA, 19 nt, synthetic construct
  source 1..19: mol_type = other RNA
aagaactcttctttcttga

SEQ ID NO: 433 - RNA, 19 nt, synthetic construct
  source 1..19: mol_type = other RNA
tagaactcttctttcttga

SEQ ID NO: 434 - RNA, 19 nt, synthetic construct
  source 1..19: mol_type = other RNA
nagaactcttctttcttga

SEQ ID NO: 435 - RNA, 19 nt, synthetic construct
  source 1..19: mol_type = other RNA
nagaactcttctttcttgn

SEQ ID NO: 436 - RNA, 19 nt, synthetic construct
  source 1..19: mol_type = other RNA
gaacagatcttcatgatct

SEQ ID NO: 437 - RNA, 19 nt, synthetic construct
  source 1..19: mol_type = other RNA
aaacagatcttcatgatct

SEQ ID NO: 438 - RNA, 19 nt, synthetic construct
  source 1..19: mol_type = other RNA
taacagatcttcatgatct

SEQ ID NO: 439 - RNA, 19 nt, synthetic construct
  source 1..19: mol_type = other RNA
naacagatcttcatgatct

SEQ ID NO: 440 - RNA, 19 nt, synthetic construct
  source 1..19: mol_type = other RNA
naacagatcttcatgatcn

SEQ ID NO: 441 - RNA, 19 nt, synthetic construct
  source 1..19: mol_type = other RNA
cttcaatggtggaacagat

SEQ ID NO: 442 - RNA, 19 nt, synthetic construct
  source 1..19: mol_type = other RNA
attcaatggtggaacagat

SEQ ID NO: 443 - RNA, 19 nt, synthetic construct
  source 1..19: mol_type = other RNA
tttcaatggtggaacagat

SEQ ID NO: 444 - RNA, 19 nt, synthetic construct
  source 1..19: mol_type = other RNA
nttcaatggtggaacagat

SEQ ID NO: 445 - RNA, 19 nt, synthetic construct
  source 1..19: mol_type = other RNA
nttcaatggtggaacagan

SEQ ID NO: 446 - RNA, 19 nt, synthetic construct
  source 1..19: mol_type = other RNA
ctgagttcttcaatggtgg

SEQ ID NO: 447 - RNA, 19 nt, synthetic construct
  source 1..19: mol_type = other RNA
atgagttcttcaatggtgg

SEQ ID NO: 448 - RNA, 19 nt, synthetic construct
  source 1..19: mol_type = other RNA
ttgagttcttcaatggtgg

SEQ ID NO: 449 - RNA, 19 nt, synthetic construct
  source 1..19: mol_type = other RNA
ntgagttcttcaatggtgg

SEQ ID NO: 450 - RNA, 19 nt, synthetic construct
  source 1..19: mol_type = other RNA
ntgagttcttcaatggtgg

SEQ ID NO: 451 - RNA, 19 nt, synthetic construct
  source 1..19: mol_type = other RNA
tggtcttagtgagtatctc

SEQ ID NO: 452 - RNA, 19 nt, synthetic construct
  source 1..19: mol_type = other RNA
aggtcttagtgagtatctc

SEQ ID NO: 453 - RNA, 19 nt, synthetic construct
  source 1..19: mol_type = other RNA
nggtcttagtgagtatctc

SEQ ID NO: 454 - RNA, 19 nt, synthetic construct
  source 1..19: mol_type = other RNA
nggtcttagtgagtatctn

SEQ ID NO: 455 - RNA, 19 nt, synthetic construct
  source 1..19: mol_type = other RNA
ccatgtttcaacctttcga

SEQ ID NO: 456 - RNA, 19 nt, synthetic construct
  source 1..19: mol_type = other RNA
acatgtttcaacctttcga

SEQ ID NO: 457 - RNA, 19 nt, synthetic construct
  source 1..19: mol_type = other RNA
tcatgtttcaacctttcga

SEQ ID NO: 458 - RNA, 19 nt, synthetic construct
  source 1..19: mol_type = other RNA
ncatgtttcaacctttcga

SEQ ID NO: 459 - RNA, 19 nt, synthetic construct
  source 1..19: mol_type = other RNA
ncatgtttcaacctttcgn

SEQ ID NO: 460 - RNA, 19 nt, synthetic construct
  source 1..19: mol_type = other RNA
ctagcatgtacgccaccat

SEQ ID NO: 461 - RNA, 19 nt, synthetic construct
  source 1..19: mol_type = other RNA
atagcatgtacgccaccat

SEQ ID NO: 462 - RNA, 19 nt, synthetic construct
  source 1..19: mol_type = other RNA
ttagcatgtacgccaccat

SEQ ID NO: 463 - RNA, 19 nt, synthetic construct
  source 1..19: mol_type = other RNA
ntagcatgtacgccaccat

SEQ ID NO: 464 - RNA, 19 nt, synthetic construct
  source 1..19: mol_type = other RNA
ntagcatgtacgccaccan

SEQ ID NO: 465 - RNA, 19 nt, synthetic construct
  source 1..19: mol_type = other RNA
ttactatgtttctagcagc

SEQ ID NO: 466 - RNA, 19 nt, synthetic construct
  source 1..19: mol_type = other RNA
atactatgtttctagcagc

SEQ ID NO: 467 - RNA, 19 nt, synthetic construct
  source 1..19: mol_type = other RNA
ntactatgtttctagcagc

SEQ ID NO: 468 - RNA, 19 nt, synthetic construct
  source 1..19: mol_type = other RNA
ntactatgtttctagcagn

SEQ ID NO: 469 - RNA, 19 nt, synthetic construct
  source 1..19: mol_type = other RNA
gactgatgatccgcttgtc

SEQ ID NO: 470 - RNA, 19 nt, synthetic construct
  source 1..19: mol_type = other RNA
aactgatgatccgcttgtc

SEQ ID NO: 471 - RNA, 19 nt, synthetic construct
  source 1..19: mol_type = other RNA
tactgatgatccgcttgtc

SEQ ID NO: 472 - RNA, 19 nt, synthetic construct
  source 1..19: mol_type = other RNA
nactgatgatccgcttgtc

SEQ ID NO: 473 - RNA, 19 nt, synthetic construct
  source 1..19: mol_type = other RNA
nactgatgatccgcttgtn

SEQ ID NO: 474 - RNA, 19 nt, synthetic construct
  source 1..19: mol_type = other RNA
ccttgatcatgcaatcctc

SEQ ID NO: 475 - RNA, 19 nt, synthetic construct
  source 1..19: mol_type = other RNA
acttgatcatgcaatcctc

SEQ ID NO: 476 - RNA, 19 nt, synthetic construct
  source 1..19: mol_type = other RNA
tcttgatcatgcaatcctc

SEQ ID NO: 477 - RNA, 19 nt, synthetic construct
  source 1..19: mol_type = other RNA
ncttgatcatgcaatcctc

SEQ ID NO: 478 - RNA, 19 nt, synthetic construct
  source 1..19: mol_type = other RNA
ncttgatcatgcaatcctn

SEQ ID NO: 479 - RNA, 19 nt, synthetic construct
  source 1..19: mol_type = other RNA
ggtcaatactcactaccac

SEQ ID NO: 480 - RNA, 19 nt, synthetic construct
  source 1..19: mol_type = other RNA
agtcaatactcactaccac

SEQ ID NO: 481 - RNA, 19 nt, synthetic construct
  source 1..19: mol_type = other RNA
tgtcaatactcactaccac

SEQ ID NO: 482 - RNA, 19 nt, synthetic construct
  source 1..19: mol_type = other RNA
ngtcaatactcactaccac

SEQ ID NO: 483 - RNA, 19 nt, synthetic construct
  source 1..19: mol_type = other RNA
ngtcaatactcactaccan

SEQ ID NO: 484 - RNA, 19 nt, synthetic construct
  source 1..19: mol_type = other RNA
agacaatagtacgttccct

SEQ ID NO: 485 - RNA, 19 nt, synthetic construct
  source 1..19: mol_type = other RNA
tgacaatagtacgttccct

SEQ ID NO: 486 - RNA, 19 nt, synthetic construct
  source 1..19: mol_type = other RNA
ngacaatagtacgttccct

SEQ ID NO: 487 - RNA, 19 nt, synthetic construct
  source 1..19: mol_type = other RNA
ngacaatagtacgttcccn

SEQ ID NO: 488 - RNA, 19 nt, synthetic construct
  source 1..19: mol_type = other RNA
ccattgatctcccacatca

SEQ ID NO: 489 - RNA, 19 nt, synthetic construct
  source 1..19: mol_type = other RNA
acattgatctcccacatca

SEQ ID NO: 490 - RNA, 19 nt, synthetic construct
  source 1..19: mol_type = other RNA
tcattgatctcccacatca

SEQ ID NO: 491 - RNA, 19 nt, synthetic construct
  source 1..19: mol_type = other RNA
ncattgatctcccacatca

SEQ ID NO: 492 - RNA, 19 nt, synthetic construct
  source 1..19: mol_type = other RNA
ncattgatctcccacatcn

SEQ ID NO: 493 - RNA, 19 nt, synthetic construct
  source 1..19: mol_type = other RNA
tggaacagtgtccttacga

SEQ ID NO: 494 - RNA, 19 nt, synthetic construct
  source 1..19: mol_type = other RNA
aggaacagtgtccttacga

SEQ ID NO: 495 - RNA, 19 nt, synthetic construct
  source 1..19: mol_type = other RNA
nggaacagtgtccttacga

SEQ ID NO: 496 - RNA, 19 nt, synthetic construct
  source 1..19: mol_type = other RNA
nggaacagtgtccttacgn

SEQ ID NO: 497 - RNA, 19 nt, synthetic construct
  source 1..19: mol_type = other RNA
ttgttgtaattgaatactg

SEQ ID NO: 498 - RNA, 19 nt, synthetic construct
  source 1..19: mol_type = other RNA
atgttgtaattgaatactg

SEQ ID NO: 499 - RNA, 19 nt, synthetic construct
  source 1..19: mol_type = other RNA
ntgttgtaattgaatactg

SEQ ID NO: 500 - RNA, 19 nt, synthetic construct
  source 1..19: mol_type = other RNA
ntgttgtaattgaatactn

SEQ ID NO: 501 - RNA, 19 nt, synthetic construct
  source 1..19: mol_type = other RNA
cagtaagtatgctagagtc

SEQ ID NO: 502 - RNA, 19 nt, synthetic construct
  source 1..19: mol_type = other RNA
aagtaagtatgctagagtc

SEQ ID NO: 503 - RNA, 19 nt, synthetic construct
  source 1..19: mol_type = other RNA
tagtaagtatgctagagtc

SEQ ID NO: 504 - RNA, 19 nt, synthetic construct
  source 1..19: mol_type = other RNA
nagtaagtatgctagagtc

SEQ ID NO: 505 - RNA, 19 nt, synthetic construct
  source 1..19: mol_type = other RNA
nagtaagtatgctagagtn

SEQ ID NO: 506 - RNA, 19 nt, synthetic construct
  source 1..19: mol_type = other RNA
caccaatcattcttccgac

SEQ ID NO: 507 - RNA, 19 nt, synthetic construct
  source 1..19: mol_type = other RNA
aaccaatcattcttccgac

SEQ ID NO: 508 - RNA, 19 nt, synthetic construct
  source 1..19: mol_type = other RNA
taccaatcattcttccgac

SEQ ID NO: 509 - RNA, 19 nt, synthetic construct
  source 1..19: mol_type = other RNA
naccaatcattcttccgac

SEQ ID NO: 510 - RNA, 19 nt, synthetic construct
  source 1..19: mol_type = other RNA
naccaatcattcttccgan

SEQ ID NO: 511 - RNA, 19 nt, synthetic construct
  source 1..19: mol_type = other RNA
atgctattctggattagtc

SEQ ID NO: 512 - RNA, 19 nt, synthetic construct
  source 1..19: mol_type = other RNA
ttgctattctggattagtc

SEQ ID NO: 513 - RNA, 19 nt, synthetic construct
  source 1..19: mol_type = other RNA
ntgctattctggattagtc

SEQ ID NO: 514 - RNA, 19 nt, synthetic construct
  source 1..19: mol_type = other RNA
ntgctattctggattagtn

SEQ ID NO: 515 - RNA, 19 nt, synthetic construct
  source 1..19: mol_type = other RNA
gcagaaagcaccatcctct

SEQ ID NO: 516 - RNA, 19 nt, synthetic construct
  source 1..19: mol_type = other RNA
acagaaagcaccatcctct

SEQ ID NO: 517 - RNA, 19 nt, synthetic construct
  source 1..19: mol_type = other RNA
tcagaaagcaccatcctct

SEQ ID NO: 518 - RNA, 19 nt, synthetic construct
  source 1..19: mol_type = other RNA
ncagaaagcaccatcctct

SEQ ID NO: 519 - RNA, 19 nt, synthetic construct
  source 1..19: mol_type = other RNA
ncagaaagcaccatcctcn

SEQ ID NO: 520 - RNA, 19 nt, synthetic construct
  source 1..19: mol_type = other RNA
gccaaatcatgatatgagt

SEQ ID NO: 521 - RNA, 19 nt, synthetic construct
  source 1..19: mol_type = other RNA
accaaatcatgatatgagt

SEQ ID NO: 522 - RNA, 19 nt, synthetic construct
  source 1..19: mol_type = other RNA
tccaaatcatgatatgagt

SEQ ID NO: 523 - RNA, 19 nt, synthetic construct
  source 1..19: mol_type = other RNA
nccaaatcatgatatgagt

SEQ ID NO: 524 - RNA, 19 nt, synthetic construct
  source 1..19: mol_type = other RNA
nccaaatcatgatatgagn

SEQ ID NO: 525 - RNA, 19 nt, synthetic construct
  source 1..19: mol_type = other RNA
ctgatatgtggcatcattc

SEQ ID NO: 526 - RNA, 19 nt, synthetic construct
  source 1..19: mol_type = other RNA
atgatatgtggcatcattc

SEQ ID NO: 527 - RNA, 19 nt, synthetic construct
  source 1..19: mol_type = other RNA
ttgatatgtggcatcattc

SEQ ID NO: 528 - RNA, 19 nt, synthetic construct
  source 1..19: mol_type = other RNA
ntgatatgtggcatcattc

SEQ ID NO: 529 - RNA, 19 nt, synthetic construct
  source 1..19: mol_type = other RNA
ntgatatgtggcatcattn

SEQ ID NO: 530 - RNA, 19 nt, synthetic construct
  source 1..19: mol_type = other RNA
tgttgaaccttgcattaga

SEQ ID NO: 531 - RNA, 19 nt, synthetic construct
  source 1..19: mol_type = other RNA
agttgaaccttgcattaga

SEQ ID NO: 532 - RNA, 19 nt, synthetic construct
  source 1..19: mol_type = other RNA
ngttgaaccttgcattaga

SEQ ID NO: 533 - RNA, 19 nt, synthetic construct
  source 1..19: mol_type = other RNA
ngttgaaccttgcattagn

SEQ ID NO: 534 - RNA, 19 nt, synthetic construct
  source 1..19: mol_type = other RNA
ccacgtttgatcattctga

SEQ ID NO: 535 - RNA, 19 nt, synthetic construct
  source 1..19: mol_type = other RNA
acacgtttgatcattctga

SEQ ID NO: 536 - RNA, 19 nt, synthetic construct
  source 1..19: mol_type = other RNA
tcacgtttgatcattctga

SEQ ID NO: 537 - RNA, 19 nt, synthetic construct
  source 1..19: mol_type = other RNA
ncacgtttgatcattctga

SEQ ID NO: 538 - RNA, 19 nt, synthetic construct
  source 1..19: mol_type = other RNA
ncacgtttgatcattctgn

SEQ ID NO: 539 - RNA, 19 nt, synthetic construct
  source 1..19: mol_type = other RNA
ccagaaatttcggtcattg

SEQ ID NO: 540 - RNA, 19 nt, synthetic construct
  source 1..19: mol_type = other RNA
acagaaatttcggtcattg

SEQ ID NO: 541 - RNA, 19 nt, synthetic construct
  source 1..19: mol_type = other RNA
tcagaaatttcggtcattg

SEQ ID NO: 542 - RNA, 19 nt, synthetic construct
  source 1..19: mol_type = other RNA
ncagaaatttcggtcattg

SEQ ID NO: 543 - RNA, 19 nt, synthetic construct
  source 1..19: mol_type = other RNA
ncagaaatttcggtcattn

SEQ ID NO: 544 - RNA, 19 nt, synthetic construct
  source 1..19: mol_type = other RNA
cctttgaggatattgcaca

SEQ ID NO: 545 - RNA, 19 nt, synthetic construct
  source 1..19: mol_type = other RNA
actttgaggatattgcaca

SEQ ID NO: 546 - RNA, 19 nt, synthetic construct
  source 1..19: mol_type = other RNA
tctttgaggatattgcaca

SEQ ID NO: 547 - RNA, 19 nt, synthetic construct
  source 1..19: mol_type = other RNA
nctttgaggatattgcaca

SEQ ID NO: 548 - RNA, 19 nt, synthetic construct
  source 1..19: mol_type = other RNA
nctttgaggatattgcacn

SEQ ID NO: 549 - RNA, 19 nt, synthetic construct
  source 1..19: mol_type = other RNA
ctcagaatgagtgctgacc

SEQ ID NO: 550 - RNA, 19 nt, synthetic construct
  source 1..19: mol_type = other RNA
atcagaatgagtgctgacc

SEQ ID NO: 551 - RNA, 19 nt, synthetic construct
  source 1..19: mol_type = other RNA
ttcagaatgagtgctgacc

SEQ ID NO: 552 - RNA, 19 nt, synthetic construct
  source 1..19: mol_type = other RNA
ntcagaatgagtgctgacc

SEQ ID NO: 553 - RNA, 19 nt, synthetic construct
  source 1..19: mol_type = other RNA
ntcagaatgagtgctgacn

SEQ ID NO: 554 - RNA, 19 nt, synthetic construct
  source 1..19: mol_type = other RNA
ggatttatgtgcaactgat

SEQ ID NO: 555 - RNA, 19 nt, synthetic construct
  source 1..19: mol_type = other RNA
agatttatgtgcaactgat

SEQ ID NO: 556 - RNA, 19 nt, synthetic construct
  source 1..19: mol_type = other RNA
tgatttatgtgcaactgat

SEQ ID NO: 557 - RNA, 19 nt, synthetic construct
  source 1..19: mol_type = other RNA
ngatttatgtgcaactgat

SEQ ID NO: 558 - RNA, 19 nt, synthetic construct
  source 1..19: mol_type = other RNA
ngatttatgtgcaactgan

SEQ ID NO: 559 - RNA, 19 nt, synthetic construct
  source 1..19: mol_type = other RNA
caccaattgactcttgtga

SEQ ID NO: 560 - RNA, 19 nt, synthetic construct
  source 1..19: mol_type = other RNA
aaccaattgactcttgtga

SEQ ID NO: 561 - RNA, 19 nt, synthetic construct
  source 1..19: mol_type = other RNA
taccaattgactcttgtga

SEQ ID NO: 562 - RNA, 19 nt, synthetic construct
  source 1..19: mol_type = other RNA
naccaattgactcttgtga

SEQ ID NO: 563 - RNA, 19 nt, synthetic construct
  source 1..19: mol_type = other RNA
naccaattgactcttgtgn

SEQ ID NO: 564 - RNA, 19 nt, synthetic construct
  source 1..19: mol_type = other RNA
ctcttatgaaacttgatac

SEQ ID NO: 565 - RNA, 19 nt, synthetic construct
  source 1..19: mol_type = other RNA
atcttatgaaacttgatac

SEQ ID NO: 566 - RNA, 19 nt, synthetic construct
  source 1..19: mol_type = other RNA
ttcttatgaaacttgatac

SEQ ID NO: 567 - RNA, 19 nt, synthetic construct
  source 1..19: mol_type = other RNA
ntcttatgaaacttgatac

SEQ ID NO: 568 - RNA, 19 nt, synthetic construct
  source 1..19: mol_type = other RNA
ntcttatgaaacttgatan

SEQ ID NO: 569 - RNA, 19 nt, synthetic construct
  source 1..19: mol_type = other RNA
tgagaatgtaggctgcaca

SEQ ID NO: 570 - RNA, 19 nt, synthetic construct
  source 1..19: mol_type = other RNA
agagaatgtaggctgcaca

SEQ ID NO: 571 - RNA, 19 nt, synthetic construct
  source 1..19: mol_type = other RNA
ngagaatgtaggctgcaca

SEQ ID NO: 572 - RNA, 19 nt, synthetic construct
  source 1..19: mol_type = other RNA
ngagaatgtaggctgcacn

SEQ ID NO: 573 - RNA, 19 nt, synthetic construct
  source 1..19: mol_type = other RNA
ttactcatgtcaaaggaag

SEQ ID NO: 574 - RNA, 19 nt, synthetic construct
  source 1..19: mol_type = other RNA
atactcatgtcaaaggaag

SEQ ID NO: 575 - RNA, 19 nt, synthetic construct
  source 1..19: mol_type = other RNA
ntactcatgtcaaaggaag

SEQ ID NO: 576 - RNA, 19 nt, synthetic construct
  source 1..19: mol_type = other RNA
ntactcatgtcaaaggaan

SEQ ID NO: 577 - RNA, 19 nt, synthetic construct
  source 1..19: mol_type = other RNA
agaaataagacccttcatt

SEQ ID NO: 578 - RNA, 19 nt, synthetic construct
  source 1..19: mol_type = other RNA
tgaaataagacccttcatt

SEQ ID NO: 579 - RNA, 19 nt, synthetic construct
  source 1..19: mol_type = other RNA
ngaaataagacccttcatt

SEQ ID NO: 580 - RNA, 19 nt, synthetic construct
  source 1..19: mol_type = other RNA
ngaaataagacccttcatn

SEQ ID NO: 581 - RNA, 19 nt, synthetic construct
  source 1..19: mol_type = other RNA
gaagcattgtcgcacaaag

SEQ ID NO: 582 - RNA, 19 nt, synthetic construct
  source 1..19: mol_type = other RNA
aaagcattgtcgcacaaag

SEQ ID NO: 583 - RNA, 19 nt, synthetic construct
  source 1..19: mol_type = other RNA
taagcattgtcgcacaaag

SEQ ID NO: 584 - RNA, 19 nt, synthetic construct
  source 1..19: mol_type = other RNA
naagcattgtcgcacaaag

SEQ ID NO: 585 - RNA, 19 nt, synthetic construct
  source 1..19: mol_type = other RNA
naagcattgtcgcacaaan

SEQ ID NO: 586 - RNA, 19 nt, synthetic construct
  source 1..19: mol_type = other RNA
tgaaatggaaatccgaata

SEQ ID NO: 587 - RNA, 19 nt, synthetic construct
  source 1..19: mol_type = other RNA
agaaatggaaatccgaata

SEQ ID NO: 588 - RNA, 19 nt, synthetic construct
  source 1..19: mol_type = other RNA
ngaaatggaaatccgaata

SEQ ID NO: 589 - RNA, 19 nt, synthetic construct
  source 1..19: mol_type = other RNA
ngaaatggaaatccgaatn

SEQ ID NO: 590 - RNA, 19 nt, synthetic construct
  source 1..19: mol_type = other RNA
ccatgattcggtctcttcc

SEQ ID NO: 591 - RNA, 19 nt, synthetic construct
  source 1..19: mol_type = other RNA
acatgattcggtctcttcc

SEQ ID NO: 592 - RNA, 19 nt, synthetic construct
  source 1..19: mol_type = other RNA
tcatgattcggtctcttcc

SEQ ID NO: 593 - RNA, 19 nt, synthetic construct
  source 1..19: mol_type = other RNA
ncatgattcggtctcttcc

SEQ ID NO: 594 - RNA, 19 nt, synthetic construct
  source 1..19: mol_type = other RNA
ncatgattcggtctcttcn

SEQ ID NO: 595 - RNA, 19 nt, synthetic construct
  source 1..19: mol_type = other RNA
tgaaaagcctagttttgat

SEQ ID NO: 596 - RNA, 19 nt, synthetic construct
  source 1..19: mol_type = other RNA
agaaaagcctagttttgat

SEQ ID NO: 597 - RNA, 19 nt, synthetic construct
  source 1..19: mol_type = other RNA
ngaaaagcctagttttgat

SEQ ID NO: 598 - RNA, 19 nt, synthetic construct
  source 1..19: mol_type = other RNA
ngaaaagcctagttttgan

SEQ ID NO: 599 - RNA, 19 nt, synthetic construct
  source 1..19: mol_type = other RNA
gacgaaaggaatcccatag

SEQ ID NO: 600 - RNA, 19 nt, synthetic construct
  source 1..19: mol_type = other RNA
aacgaaaggaatcccatag

SEQ ID NO: 601 - RNA, 19 nt, synthetic construct
  source 1..19: mol_type = other RNA
tacgaaaggaatcccatag

SEQ ID NO: 602 - RNA, 19 nt, synthetic construct
  source 1..19: mol_type = other RNA
nacgaaaggaatcccatag

SEQ ID NO: 603 - RNA, 19 nt, synthetic construct
  source 1..19: mol_type = other RNA
nacgaaaggaatcccatan

SEQ ID NO: 604 - RNA, 19 nt, synthetic construct
  source 1..19: mol_type = other RNA
cttcaattgtctcttcgcc

SEQ ID NO: 605 - RNA, 19 nt, synthetic construct
  source 1..19: mol_type = other RNA
attcaattgtctcttcgcc

SEQ ID NO: 606 - RNA, 19 nt, synthetic construct
  source 1..19: mol_type = other RNA
tttcaattgtctcttcgcc

SEQ ID NO: 607 - RNA, 19 nt, synthetic construct
  source 1..19: mol_type = other RNA
nttcaattgtctcttcgcc

SEQ ID NO: 608 - RNA, 19 nt, synthetic construct
  source 1..19: mol_type = other RNA
nttcaattgtctcttcgcn

SEQ ID NO: 609 - RNA, 19 nt, synthetic construct
  source 1..19: mol_type = other RNA
ctcgaatccatctacatag

SEQ ID NO: 610 - RNA, 19 nt, synthetic construct
  source 1..19: mol_type = other RNA
atcgaatccatctacatag

SEQ ID NO: 611 - RNA, 19 nt, synthetic construct
  source 1..19: mol_type = other RNA
ttcgaatccatctacatag

SEQ ID NO: 612 - RNA, 19 nt, synthetic construct
  source 1..19: mol_type = other RNA
ntcgaatccatctacatag

SEQ ID NO: 613 - RNA, 19 nt, synthetic construct
  source 1..19: mol_type = other RNA
ntcgaatccatctacatan

SEQ ID NO: 614 - RNA, 19 nt, synthetic construct
  source 1..19: mol_type = other RNA
tgacatttgggaaagcttg

SEQ ID NO: 615 - RNA, 19 nt, synthetic construct
  source 1..19: mol_type = other RNA
agacatttgggaaagcttg

SEQ ID NO: 616 - RNA, 19 nt, synthetic construct
  source 1..19: mol_type = other RNA
ngacatttgggaaagcttg

SEQ ID NO: 617 - RNA, 19 nt, synthetic construct
  source 1..19: mol_type = other RNA
ngacatttgggaaagcttn

SEQ ID NO: 618 - RNA, 19 nt, synthetic construct
  source 1..19: mol_type = other RNA
tttgattgcatcatatagt

SEQ ID NO: 619 - RNA, 19 nt, synthetic construct
  source 1..19: mol_type = other RNA
attgattgcatcatatagt

SEQ ID NO: 620 - RNA, 19 nt, synthetic construct
  source 1..19: mol_type = other RNA
nttgattgcatcatatagt

SEQ ID NO: 621 - RNA, 19 nt, synthetic construct
  source 1..19: mol_type = other RNA
nttgattgcatcatatagn

SEQ ID NO: 622 - RNA, 19 nt, synthetic construct
  source 1..19: mol_type = other RNA
aaggtctccaacatctttg

SEQ ID NO: 623 - RNA, 19 nt, synthetic construct
  source 1..19: mol_type = other RNA
taggtctccaacatctttg

SEQ ID NO: 624 - RNA, 19 nt, synthetic construct
  source 1..19: mol_type = other RNA
naggtctccaacatctttg

SEQ ID NO: 625 - RNA, 19 nt, synthetic construct
  source 1..19: mol_type = other RNA
naggtctccaacatctttn

SEQ ID NO: 626 - RNA, 19 nt, synthetic construct
  source 1..19: mol_type = other RNA
tcatcaagttctatccagc

SEQ ID NO: 627 - RNA, 19 nt, synthetic construct
  source 1..19: mol_type = other RNA
acatcaagttctatccagc

SEQ ID NO: 628 - RNA, 19 nt, synthetic construct
  source 1..19: mol_type = other RNA
ncatcaagttctatccagc

SEQ ID NO: 629 - RNA, 19 nt, synthetic construct
  source 1..19: mol_type = other RNA
ncatcaagttctatccagn

SEQ ID NO: 630 - RNA, 19 nt, synthetic construct
  source 1..19: mol_type = other RNA
acatttgcttatcattggg

SEQ ID NO: 631 - RNA, 19 nt, synthetic construct
  source 1..19: mol_type = other RNA
tcatttgcttatcattggg

SEQ ID NO: 632 - RNA, 19 nt, synthetic construct
  source 1..19: mol_type = other RNA
ncatttgcttatcattggg

SEQ ID NO: 633 - RNA, 19 nt, synthetic construct
  source 1..19: mol_type = other RNA
ncatttgcttatcattggn

SEQ ID NO: 634 - RNA, 19 nt, synthetic construct
  source 1..19: mol_type = other RNA
tcattaatcaggcactcct

SEQ ID NO: 635 - RNA, 19 nt, synthetic construct
  source 1..19: mol_type = other RNA
acattaatcaggcactcct

SEQ ID NO: 636 - RNA, 19 nt, synthetic construct
  source 1..19: mol_type = other RNA
ncattaatcaggcactcct

SEQ ID NO: 637 - RNA, 19 nt, synthetic construct
  source 1..19: mol_type = other RNA
ncattaatcaggcactccn

SEQ ID NO: 638 - RNA, 19 nt, synthetic construct
  source 1..19: mol_type = other RNA
aaccgaggtcgaaacgtac

SEQ ID NO: 639 - RNA, 19 nt, synthetic construct
  source 1..19: mol_type = other RNA
aaccgaggtcgaaacgtat

SEQ ID NO: 640 - RNA, 19 nt, synthetic construct
  source 1..19: mol_type = other RNA
aaccgaggtcgaaacgtaa

SEQ ID NO: 641 - RNA, 19 nt, synthetic construct
  source 1..19: mol_type = other RNA
aaccgaggtcgaaacgtan

SEQ ID NO: 642 - RNA, 19 nt, synthetic construct
  source 1..19: mol_type = other RNA
naccgaggtcgaaacgtan

SEQ ID NO: 643 - RNA, 19 nt, synthetic construct
  source 1..19: mol_type = other RNA
gtacgttctttctatcatc

SEQ ID NO: 644 - RNA, 19 nt, synthetic construct
  source 1..19: mol_type = other RNA
gtacgttctttctatcatt

SEQ ID NO: 645 - RNA, 19 nt, synthetic construct
  source 1..19: mol_type = other RNA
gtacgttctttctatcata

SEQ ID NO: 646 - RNA, 19 nt, synthetic construct
  source 1..19: mol_type = other RNA
gtacgttctttctatcatn

SEQ ID NO: 647 - RNA, 19 nt, synthetic construct
  source 1..19: mol_type = other RNA
ntacgttctttctatcatn

SEQ ID NO: 648 - RNA, 19 nt, synthetic construct
  source 1..19: mol_type = other RNA
acaagaccaatcttgtcac

SEQ ID NO: 649 - RNA, 19 nt, synthetic construct
  source 1..19: mol_type = other RNA
acaagaccaatcttgtcat

SEQ ID NO: 650 - RNA, 19 nt, synthetic construct
  source 1..19: mol_type = other RNA
acaagaccaatcttgtcaa

SEQ ID NO: 651 - RNA, 19 nt, synthetic construct
  source 1..19: mol_type = other RNA
acaagaccaatcttgtcan

SEQ ID NO: 652 - RNA, 19 nt, synthetic construct
  source 1..19: mol_type = other RNA
ncaagaccaatcttgtcan

SEQ ID NO: 653 - RNA, 19 nt, synthetic construct
  source 1..19: mol_type = other RNA
aatcttgtcacctctgact

SEQ ID NO: 654 - RNA, 19 nt, synthetic construct
  source 1..19: mol_type = other RNA
aatcttgtcacctctgaca

SEQ ID NO: 655 - RNA, 19 nt, synthetic construct
  source 1..19: mol_type = other RNA
aatcttgtcacctctgacn

SEQ ID NO: 656 - RNA, 19 nt, synthetic construct
  source 1..19: mol_type = other RNA
natcttgtcacctctgacn

SEQ ID NO: 657 - RNA, 19 nt, synthetic construct
  source 1..19: mol_type = other RNA
tcttgtcacctctgactaa

SEQ ID NO: 658 - RNA, 19 nt, synthetic construct
  source 1..19: mol_type = other RNA
tcttgtcacctctgactat

SEQ ID NO: 659 - RNA, 19 nt, synthetic construct
  source 1..19: mol_type = other RNA
tcttgtcacctctgactan

SEQ ID NO: 660 - RNA, 19 nt, synthetic construct
  source 1..19: mol_type = other RNA
ncttgtcacctctgactan

SEQ ID NO: 661 - RNA, 19 nt, synthetic construct
  source 1..19: mol_type = other RNA
cgaacaacatggatagagc

SEQ ID NO: 662 - RNA, 19 nt, synthetic construct
  source 1..19: mol_type = other RNA
cgaacaacatggatagagt

SEQ ID NO: 663 - RNA, 19 nt, synthetic construct
  source 1..19: mol_type = other RNA
cgaacaacatggatagaga

SEQ ID NO: 664 - RNA, 19 nt, synthetic construct
  source 1..19: mol_type = other RNA
cgaacaacatggatagagn

SEQ ID NO: 665 - RNA, 19 nt, synthetic construct
  source 1..19: mol_type = other RNA
ngaacaacatggatagagn

SEQ ID NO: 666 - RNA, 19 nt, synthetic construct
  source 1..19: mol_type = other RNA
caacatggatagagcagtt

SEQ ID NO: 667 - RNA, 19 nt, synthetic construct
  source 1..19: mol_type = other RNA
caacatggatagagcagta

SEQ ID NO: 668 - RNA, 19 nt, synthetic construct
  source 1..19: mol_type = other RNA
caacatggatagagcagtn

SEQ ID NO: 669 - RNA, 19 nt, synthetic construct
  source 1..19: mol_type = other RNA
naacatggatagagcagtn

SEQ ID NO: 670 - RNA, 19 nt, synthetic construct
  source 1..19: mol_type = other RNA
tcactaagctattcaactg

SEQ ID NO: 671 - RNA, 19 nt, synthetic construct
  source 1..19: mol_type = other RNA
tcactaagctattcaactt

SEQ ID NO: 672 - RNA, 19 nt, synthetic construct
  source 1..19: mol_type = other RNA
tcactaagctattcaacta

SEQ ID NO: 673 - RNA, 19 nt, synthetic construct
  source 1..19: mol_type = other RNA
tcactaagctattcaactn

SEQ ID NO: 674 - RNA, 19 nt, synthetic construct
  source 1..19: mol_type = other RNA
ncactaagctattcaactn

SEQ ID NO: 675 - RNA, 19 nt, synthetic construct
  source 1..19: mol_type = other RNA
caactggtgcacttgccag

SEQ ID NO: 676 - RNA, 19 nt, synthetic construct
  source 1..19: mol_type = other RNA
caactggtgcacttgccat

SEQ ID NO: 677 - RNA, 19 nt, synthetic construct
  source 1..19: mol_type = other RNA
caactggtgcacttgccaa

SEQ ID NO: 678 - RNA, 19 nt, synthetic construct
  source 1..19: mol_type = other RNA
caactggtgcacttgccan

SEQ ID NO: 679 - RNA, 19 nt, synthetic construct
  source 1..19: mol_type = other RNA
naactggtgcacttgccan

SEQ ID NO: 680 - RNA, 19 nt, synthetic construct
  source 1..19: mol_type = other RNA
tgaccacagaagctgcttt

SEQ ID NO: 681 - RNA, 19 nt, synthetic construct
  source 1..19: mol_type = other RNA
tgaccacagaagctgctta

SEQ ID NO: 682 - RNA, 19 nt, synthetic construct
  source 1..19: mol_type = other RNA
tgaccacagaagctgcttn

SEQ ID NO: 683 - RNA, 19 nt, synthetic construct
  source 1..19: mol_type = other RNA
ngaccacagaagctgcttn

SEQ ID NO: 684 - RNA, 19 nt, synthetic construct
  source 1..19: mol_type = other RNA
accaatccactaatcaggc

SEQ ID NO: 685 - RNA, 19 nt, synthetic construct
  source 1..19: mol_type = other RNA
accaatccactaatcaggt

SEQ ID NO: 686 - RNA, 19 nt, synthetic construct
  source 1..19: mol_type = other RNA
accaatccactaatcagga

SEQ ID NO: 687 - RNA, 19 nt, synthetic construct
  source 1..19: mol_type = other RNA
accaatccactaatcaggn

SEQ ID NO: 688 - RNA, 19 nt, synthetic construct
  source 1..19: mol_type = other RNA
nccaatccactaatcaggn

SEQ ID NO: 689 - RNA, 19 nt, synthetic construct
  source 1..19: mol_type = other RNA
ctattgggactcatcctag

SEQ ID NO: 690 - RNA, 19 nt, synthetic construct
  source 1..19: mol_type = other RNA
ctattgggactcatcctat

SEQ ID NO: 691 - RNA, 19 nt, synthetic construct
  source 1..19: mol_type = other RNA
ctattgggactcatcctaa

SEQ ID NO: 692 - RNA, 19 nt, synthetic construct
  source 1..19: mol_type = other RNA
ctattgggactcatcctan

SEQ ID NO: 693 - RNA, 19 nt, synthetic construct
  source 1..19: mol_type = other RNA
ntattgggactcatcctan

SEQ ID NO: 694 - RNA, 19 nt, synthetic construct
  source 1..19: mol_type = other RNA
tgacgatggtcattttgtc

SEQ ID NO: 695 - RNA, 19 nt, synthetic construct
  source 1..19: mol_type = other RNA
tgacgatggtcattttgtt

SEQ ID NO: 696 - RNA, 19 nt, synthetic construct
  source 1..19: mol_type = other RNA
tgacgatggtcattttgta

SEQ ID NO: 697 - RNA, 19 nt, synthetic construct
  source 1..19: mol_type = other RNA
tgacgatggtcattttgtn

SEQ ID NO: 698 - RNA, 19 nt, synthetic construct
  source 1..19: mol_type = other RNA
ngacgatggtcattttgtn

SEQ ID NO: 699 - RNA, 19 nt, synthetic construct
  source 1..19: mol_type = other RNA
gacgatggtcattttgtca

SEQ ID NO: 700 - RNA, 19 nt, synthetic construct
  source 1..19: mol_type = other RNA
gacgatggtcattttgtct

SEQ ID NO: 701 - RNA, 19 nt, synthetic construct
  source 1..19: mol_type = other RNA
gacgatggtcattttgtcn

SEQ ID NO: 702 - RNA, 19 nt, synthetic construct
  source 1..19: mol_type = other RNA
nacgatggtcattttgtcn

SEQ ID NO: 703 - RNA, 19 nt, synthetic construct
  source 1..19: mol_type = other RNA
gatgccccattccttgatc

SEQ ID NO: 704 - RNA, 19 nt, synthetic construct
  source 1..19: mol_type = other RNA
gatgccccattccttgatt

SEQ ID NO: 705 - RNA, 19 nt, synthetic construct
  source 1..19: mol_type = other RNA
gatgccccattccttgata

SEQ ID NO: 706 - RNA, 19 nt, synthetic construct
  source 1..19: mol_type = other RNA
gatgccccattccttgatn

SEQ ID NO: 707 - RNA, 19 nt, synthetic construct
  source 1..19: mol_type = other RNA
natgccccattccttgatn

SEQ ID NO: 708 - RNA, 19 nt, synthetic construct
  source 1..19: mol_type = other RNA
atgccccattccttgatcg

SEQ ID NO: 709 - RNA, 19 nt, synthetic construct
  source 1..19: mol_type = other RNA
atgccccattccttgatct

SEQ ID NO: 710 - RNA, 19 nt, synthetic construct
  source 1..19: mol_type = other RNA
atgccccattccttgatca

SEQ ID NO: 711 - RNA, 19 nt, synthetic construct
  source 1..19: mol_type = other RNA
atgccccattccttgatcn

SEQ ID NO: 712 - RNA, 19 nt, synthetic construct
  source 1..19: mol_type = other RNA
ntgccccattccttgatcn

SEQ ID NO: 713 - RNA, 19 nt, synthetic construct
  source 1..19: mol_type = other RNA
tgccccattccttgatcgg

SEQ ID NO: 714 - RNA, 19 nt, synthetic construct
  source 1..19: mol_type = other RNA
tgccccattccttgatcgt

SEQ ID NO: 715 - RNA, 19 nt, synthetic construct
  source 1..19: mol_type = other RNA
tgccccattccttgatcga

SEQ ID NO: 716 - RNA, 19 nt, synthetic construct
  source 1..19: mol_type = other RNA
tgccccattccttgatcgn

SEQ ID NO: 717 - RNA, 19 nt, synthetic construct
  source 1..19: mol_type = other RNA
ngccccattccttgatcgn

SEQ ID NO: 718 - RNA, 19 nt, synthetic construct
  source 1..19: mol_type = other RNA
gaaacagccactcttgttg

SEQ ID NO: 719 - RNA, 19 nt, synthetic construct
  source 1..19: mol_type = other RNA
gaaacagccactcttgttt

SEQ ID NO: 720 - RNA, 19 nt, synthetic construct
  source 1..19: mol_type = other RNA
gaaacagccactcttgtta

SEQ ID NO: 721 - RNA, 19 nt, synthetic construct
  source 1..19: mol_type = other RNA
gaaacagccactcttgttn

SEQ ID NO: 722 - RNA, 19 nt, synthetic construct
  source 1..19: mol_type = other RNA
naaacagccactcttgttn

SEQ ID NO: 723 - RNA, 19 nt, synthetic construct
  source 1..19: mol_type = other RNA
atcgtggaatggatcttga

SEQ ID NO: 724 - RNA, 19 nt, synthetic construct
  source 1..19: mol_type = other RNA
atcgtggaatggatcttgt

SEQ ID NO: 725 - RNA, 19 nt, synthetic construct
  source 1..19: mol_type = other RNA
atcgtggaatggatcttgn

SEQ ID NO: 726 - RNA, 19 nt, synthetic construct
  source 1..19: mol_type = other RNA
ntcgtggaatggatcttgn

SEQ ID NO: 727 - RNA, 19 nt, synthetic construct
  source 1..19: mol_type = other RNA
tcttgaaagaggaatccag

SEQ ID NO: 728 - RNA, 19 nt, synthetic construct
  source 1..19: mol_type = other RNA
tcttgaaagaggaatccat

SEQ ID NO: 729 - RNA, 19 nt, synthetic construct
  source 1..19: mol_type = other RNA
tcttgaaagaggaatccaa

SEQ ID NO: 730 - RNA, 19 nt, synthetic construct
  source 1..19: mol_type = other RNA
tcttgaaagaggaatccan

SEQ ID NO: 731 - RNA, 19 nt, synthetic construct
  source 1..19: mol_type = other RNA
ncttgaaagaggaatccan

SEQ ID NO: 732 - RNA, 19 nt, synthetic construct
  source 1..19: mol_type = other RNA
gacaattgcatctgtacct

SEQ ID NO: 733 - RNA, 19 nt, synthetic construct
  source 1..19: mol_type = other RNA
gacaattgcatctgtacca

SEQ ID NO: 734 - RNA, 19 nt, synthetic construct
  source 1..19: mol_type = other RNA
gacaattgcatctgtaccn

SEQ ID NO: 735 - RNA, 19 nt, synthetic construct
  source 1..19: mol_type = other RNA
nacaattgcatctgtaccn

SEQ ID NO: 736 - RNA, 19 nt, synthetic construct
  source 1..19: mol_type = other RNA
gcatctgtacctacttcgc

SEQ ID NO: 737 - RNA, 19 nt, synthetic construct
  source 1..19: mol_type = other RNA
gcatctgtacctacttcgt

SEQ ID NO: 738 - RNA, 19 nt, synthetic construct
  source 1..19: mol_type = other RNA
gcatctgtacctacttcga

SEQ ID NO: 739 - RNA, 19 nt, synthetic construct
  source 1..19: mol_type = other RNA
gcatctgtacctacttcgn

SEQ ID NO: 740 - RNA, 19 nt, synthetic construct
  source 1..19: mol_type = other RNA
ncatctgtacctacttcgn

SEQ ID NO: 741 - RNA, 19 nt, synthetic construct
  source 1..19: mol_type = other RNA
gagactggttcatgctcat

SEQ ID NO: 742 - RNA, 19 nt, synthetic construct
  source 1..19: mol_type = other RNA
gagactggttcatgctcaa

SEQ ID NO: 743 - RNA, 19 nt, synthetic construct
  source 1..19: mol_type = other RNA
gagactggttcatgctcan

SEQ ID NO: 744 - RNA, 19 nt, synthetic construct
  source 1..19: mol_type = other RNA
nagactggttcatgctcan

SEQ ID NO: 745 - RNA, 19 nt, synthetic construct
  source 1..19: mol_type = other RNA
gactggttcatgctcatgc

SEQ ID NO: 746 - RNA, 19 nt, synthetic construct
  source 1..19: mol_type = other RNA
gactggttcatgctcatgt

SEQ ID NO: 747 - RNA, 19 nt, synthetic construct
  source 1..19: mol_type = other RNA
gactggttcatgctcatga

SEQ ID NO: 748 - RNA, 19 nt, synthetic construct
  source 1..19: mol_type = other RNA
gactggttcatgctcatgn

SEQ ID NO: 749 - RNA, 19 nt, synthetic construct
  source 1..19: mol_type = other RNA
nactggttcatgctcatgn

SEQ ID NO: 750 - RNA, 19 nt, synthetic construct
  source 1..19: mol_type = other RNA
tgaaagcgaacttcagtgt

SEQ ID NO: 751 - RNA, 19 nt, synthetic construct
  source 1..19: mol_type = other RNA
tgaaagcgaacttcagtga

SEQ ID NO: 752 - RNA, 19 nt, synthetic construct
  source 1..19: mol_type = other RNA
tgaaagcgaacttcagtgn

SEQ ID NO: 753 - RNA, 19 nt, synthetic construct
  source 1..19: mol_type = other RNA
ngaaagcgaacttcagtgn

SEQ ID NO: 754 - RNA, 19 nt, synthetic construct
  source 1..19: mol_type = other RNA
gaacttcagtgtaatcttt

SEQ ID NO: 755 - RNA, 19 nt, synthetic construct
  source 1..19: mol_type = other RNA
gaacttcagtgtaatctta

SEQ ID NO: 756 - RNA, 19 nt, synthetic construct
  source 1..19: mol_type = other RNA
gaacttcagtgtaatcttn

SEQ ID NO: 757 - RNA, 19 nt, synthetic construct
  source 1..19: mol_type = other RNA
naacttcagtgtaatcttn

SEQ ID NO: 758 - RNA, 19 nt, synthetic construct
  source 1..19: mol_type = other RNA
cgattagagaccttgatac

SEQ ID NO: 759 - RNA, 19 nt, synthetic construct
  source 1..19: mol_type = other RNA
cgattagagaccttgatat

SEQ ID NO: 760 - RNA, 19 nt, synthetic construct
  source 1..19: mol_type = other RNA
cgattagagaccttgataa

SEQ ID NO: 761 - RNA, 19 nt, synthetic construct
  source 1..19: mol_type = other RNA
cgattagagaccttgatan

SEQ ID NO: 762 - RNA, 19 nt, synthetic construct
  source 1..19: mol_type = other RNA
ngattagagaccttgatan

SEQ ID NO: 763 - RNA, 19 nt, synthetic construct
  source 1..19: mol_type = other RNA
actactaagggctttcact

SEQ ID NO: 764 - RNA, 19 nt, synthetic construct
  source 1..19: mol_type = other RNA
actactaagggctttcaca

SEQ ID NO: 765 - RNA, 19 nt, synthetic construct
  source 1..19: mol_type = other RNA
actactaagggctttcacn

SEQ ID NO: 766 - RNA, 19 nt, synthetic construct
  source 1..19: mol_type = other RNA
nctactaagggctttcacn

SEQ ID NO: 767 - RNA, 19 nt, synthetic construct
  source 1..19: mol_type = other RNA
ctactaagggctttcactg

SEQ ID NO: 768 - RNA, 19 nt, synthetic construct
  source 1..19: mol_type = other RNA
ctactaagggctttcactt

SEQ ID NO: 769 - RNA, 19 nt, synthetic construct
  source 1..19: mol_type = other RNA
ctactaagggctttcacta

SEQ ID NO: 770 - RNA, 19 nt, synthetic construct
  source 1..19: mol_type = other RNA
ctactaagggctttcactn

SEQ ID NO: 771 - RNA, 19 nt, synthetic construct
  source 1..19: mol_type = other RNA
ntactaagggctttcactn

SEQ ID NO: 772 - RNA, 19 nt, synthetic construct
  source 1..19: mol_type = other RNA
tctcttccaggacatactt

SEQ ID NO: 773 - RNA, 19 nt, synthetic construct
  source 1..19: mol_type = other RNA
tctcttccaggacatacta

SEQ ID NO: 774 - RNA, 19 nt, synthetic construct
  source 1..19: mol_type = other RNA
tctcttccaggacatactn

SEQ ID NO: 775 - RNA, 19 nt, synthetic construct
  source 1..19: mol_type = other RNA
nctcttccaggacatactn

SEQ ID NO: 776 - RNA, 19 nt, synthetic construct
  source 1..19: mol_type = other RNA
tgaggatgtcaaaaatgca

SEQ ID NO: 777 - RNA, 19 nt, synthetic construct
  source 1..19: mol_type = other RNA
tgaggatgtcaaaaatgct

SEQ ID NO: 778 - RNA, 19 nt, synthetic construct
  source 1..19: mol_type = other RNA
tgaggatgtcaaaaatgcn

SEQ ID NO: 779 - RNA, 19 nt, synthetic construct
  source 1..19: mol_type = other RNA
ngaggatgtcaaaaatgcn

SEQ ID NO: 780 - RNA, 19 nt, synthetic construct
  source 1..19: mol_type = other RNA
tgtcaaaaatgcagttggg

SEQ ID NO: 781 - RNA, 19 nt, synthetic construct
  source 1..19: mol_type = other RNA
tgtcaaaaatgcagttggt

SEQ ID NO: 782 - RNA, 19 nt, synthetic construct
  source 1..19: mol_type = other RNA
tgtcaaaaatgcagttgga

SEQ ID NO: 783 - RNA, 19 nt, synthetic construct
  source 1..19: mol_type = other RNA
tgtcaaaaatgcagttggn

SEQ ID NO: 784 - RNA, 19 nt, synthetic construct
  source 1..19: mol_type = other RNA
ngtcaaaaatgcagttggn

SEQ ID NO: 785 - RNA, 19 nt, synthetic construct
  source 1..19: mol_type = other RNA
tgcagttggggtcctcatc

SEQ ID NO: 786 - RNA, 19 nt, synthetic construct
  source 1..19: mol_type = other RNA
tgcagttggggtcctcatt

SEQ ID NO: 787 - RNA, 19 nt, synthetic construct
  source 1..19: mol_type = other RNA
tgcagttggggtcctcata

SEQ ID NO: 788 - RNA, 19 nt, synthetic construct
  source 1..19: mol_type = other RNA
tgcagttggggtcctcatn

SEQ ID NO: 789 - RNA, 19 nt, synthetic construct
  source 1..19: mol_type = other RNA
ngcagttggggtcctcatn

SEQ ID NO: 790 - RNA, 19 nt, synthetic construct
  source 1..19: mol_type = other RNA
catcggaggacttgaatgg

SEQ ID NO: 791 - RNA, 19 nt, synthetic construct
  source 1..19: mol_type = other RNA
catcggaggacttgaatgt

SEQ ID NO: 792 - RNA, 19 nt, synthetic construct
  source 1..19: mol_type = other RNA
catcggaggacttgaatga

SEQ ID NO: 793 - RNA, 19 nt, synthetic construct
  source 1..19: mol_type = other RNA
catcggaggacttgaatgn

SEQ ID NO: 794 - RNA, 19 nt, synthetic construct
  source 1..19: mol_type = other RNA
natcggaggacttgaatgn

SEQ ID NO: 795 - RNA, 19 nt, synthetic construct
  source 1..19: mol_type = other RNA
atcggaggacttgaatgga

SEQ ID NO: 796 - RNA, 19 nt, synthetic construct
  source 1..19: mol_type = other RNA
atcggaggacttgaatggt

SEQ ID NO: 797 - RNA, 19 nt, synthetic construct
  source 1..19: mol_type = other RNA
atcggaggacttgaatggn

SEQ ID NO: 798 - RNA, 19 nt, synthetic construct
  source 1..19: mol_type = other RNA
ntcggaggacttgaatggn

SEQ ID NO: 799 - RNA, 19 nt, synthetic construct
  source 1..19: mol_type = other RNA
tcggaggacttgaatggaa

SEQ ID NO: 800 - RNA, 19 nt, synthetic construct
  source 1..19: mol_type = other RNA
tcggaggacttgaatggat

SEQ ID NO: 801 - RNA, 19 nt, synthetic construct
  source 1..19: mol_type = other RNA
tcggaggacttgaatggan

SEQ ID NO: 802 - RNA, 19 nt, synthetic construct
  source 1..19: mol_type = other RNA
ncggaggacttgaatggan

SEQ ID NO: 803 - RNA, 19 nt, synthetic construct
  source 1..19: mol_type = other RNA
ggaggacttgaatggaatg

SEQ ID NO: 804 - RNA, 19 nt, synthetic construct
  source 1..19: mol_type = other RNA
ggaggacttgaatggaatt

SEQ ID NO: 805 - RNA, 19 nt, synthetic construct
  source 1..19: mol_type = other RNA
ggaggacttgaatggaata

SEQ ID NO: 806 - RNA, 19 nt, synthetic construct
  source 1..19: mol_type = other RNA
ggaggacttgaatggaatn

SEQ ID NO: 807 - RNA, 19 nt, synthetic construct
  source 1..19: mol_type = other RNA
ngaggacttgaatggaatn

SEQ ID NO: 808 - RNA, 19 nt, synthetic construct
  source 1..19: mol_type = other RNA
gaggacttgaatggaatgg

SEQ ID NO: 809 - RNA, 19 nt, synthetic construct
  source 1..19: mol_type = other RNA
gaggacttgaatggaatgt

SEQ ID NO: 810 - RNA, 19 nt, synthetic construct
  source 1..19: mol_type = other RNA
gaggacttgaatggaatga

SEQ ID NO: 811 - RNA, 19 nt, synthetic construct
  source 1..19: mol_type = other RNA
gaggacttgaatggaatgn

SEQ ID NO: 812 - RNA, 19 nt, synthetic construct
  source 1..19: mol_type = other RNA
naggacttgaatggaatgn

SEQ ID NO: 813 - RNA, 19 nt, synthetic construct
  source 1..19: mol_type = other RNA
ttgaatggaatggtaacac

SEQ ID NO: 814 - RNA, 19 nt, synthetic construct
  source 1..19: mol_type = other RNA
ttgaatggaatggtaacat

SEQ ID NO: 815 - RNA, 19 nt, synthetic construct
  source 1..19: mol_type = other RNA
ttgaatggaatggtaacaa

SEQ ID NO: 816 - RNA, 19 nt, synthetic construct
  source 1..19: mol_type = other RNA
ttgaatggaatggtaacan

SEQ ID NO: 817 - RNA, 19 nt, synthetic construct
  source 1..19: mol_type = other RNA
ttgaatggaatggtaacan

SEQ ID NO: 818 - RNA, 19 nt, synthetic construct
  source 1..19: mol_type = other RNA
atggtaacacggttcgagt

SEQ ID NO: 819 - RNA, 19 nt, synthetic construct
  source 1..19: mol_type = other RNA
atggtaacacggttcgaga

SEQ ID NO: 820 - RNA, 19 nt, synthetic construct
  source 1..19: mol_type = other RNA
atggtaacacggttcgagn

SEQ ID NO: 821 - RNA, 19 nt, synthetic construct
  source 1..19: mol_type = other RNA
ntggtaacacggttcgagn

SEQ ID NO: 822 - RNA, 19 nt, synthetic construct
  source 1..19: mol_type = other RNA
gtaacacggttcgagtctc

SEQ ID NO: 823 - RNA, 19 nt, synthetic construct
  source 1..19: mol_type = other RNA
gtaacacggttcgagtctt

SEQ ID NO: 824 - RNA, 19 nt, synthetic construct
  source 1..19: mol_type = other RNA
gtaacacggttcgagtcta

SEQ ID NO: 825 - RNA, 19 nt, synthetic construct
  source 1..19: mol_type = other RNA
gtaacacggttcgagtctn

SEQ ID NO: 826 - RNA, 19 nt, synthetic construct
  source 1..19: mol_type = other RNA
ntaacacggttcgagtctn

SEQ ID NO: 827 - RNA, 19 nt, synthetic construct
  source 1..19: mol_type = other RNA
tacagagattcgcttggag

SEQ ID NO: 828 - RNA, 19 nt, synthetic construct
  source 1..19: mol_type = other RNA
tacagagattcgcttggat

SEQ ID NO: 829 - RNA, 19 nt, synthetic construct
  source 1..19: mol_type = other RNA
tacagagattcgcttggaa

SEQ ID NO: 830 - RNA, 19 nt, synthetic construct
  source 1..19: mol_type = other RNA
tacagagattcgcttggan

SEQ ID NO: 831 - RNA, 19 nt, synthetic construct
  source 1..19: mol_type = other RNA
nacagagattcgcttggan

SEQ ID NO: 832 - RNA, 19 nt, synthetic construct
  source 1..19: mol_type = other RNA
gatgagaatgggagacctt

SEQ ID NO: 833 - RNA, 19 nt, synthetic construct
  source 1..19: mol_type = other RNA
gatgagaatgggagaccta

SEQ ID NO: 834 - RNA, 19 nt, synthetic construct
  source 1..19: mol_type = other RNA
gatgagaatgggagacctn

SEQ ID NO: 835 - RNA, 19 nt, synthetic construct
  source 1..19: mol_type = other RNA
natgagaatgggagacctn

SEQ ID NO: 836 - RNA, 19 nt, synthetic construct
  source 1..19: mol_type = other RNA
gaatgggagaccttcacta

SEQ ID NO: 837 - RNA, 19 nt, synthetic construct
  source 1..19: mol_type = other RNA
gaatgggagaccttcactt

SEQ ID NO: 838 - RNA, 19 nt, synthetic construct
  source 1..19: mol_type = other RNA
gaatgggagaccttcactn

SEQ ID NO: 839 - RNA, 19 nt, synthetic construct
  source 1..19: mol_type = other RNA
naatgggagaccttcactn

SEQ ID NO: 840 - RNA, 19 nt, synthetic construct
  source 1..19: mol_type = other RNA
gacagagaatagtttcgaa

SEQ ID NO: 841 - RNA, 19 nt, synthetic construct
  source 1..19: mol_type = other RNA
gacagagaatagtttcgat

SEQ ID NO: 842 - RNA, 19 nt, synthetic construct
  source 1..19: mol_type = other RNA
gacagagaatagtttcgan

SEQ ID NO: 843 - RNA, 19 nt, synthetic construct
  source 1..19: mol_type = other RNA
nacagagaatagtttcgan

SEQ ID NO: 844 - RNA, 19 nt, synthetic construct
  source 1..19: mol_type = other RNA
tatgcaagccttacaacta

SEQ ID NO: 845 - RNA, 19 nt, synthetic construct
  source 1..19: mol_type = other RNA
tatgcaagccttacaactt

SEQ ID NO: 846 - RNA, 19 nt, synthetic construct
  source 1..19: mol_type = other RNA
tatgcaagccttacaactn

SEQ ID NO: 847 - RNA, 19 nt, synthetic construct
  source 1..19: mol_type = other RNA
natgcaagccttacaactn

SEQ ID NO: 848 - RNA, 19 nt, synthetic construct
  source 1..19: mol_type = other RNA
agataagagctttctcgtt

SEQ ID NO: 849 - RNA, 19 nt, synthetic construct
  source 1..19: mol_type = other RNA
agataagagctttctcgta

SEQ ID NO: 850 - RNA, 19 nt, synthetic construct
  source 1..19: mol_type = other RNA
agataagagctttctcgtn

SEQ ID NO: 851 - RNA, 19 nt, synthetic construct
  source 1..19: mol_type = other RNA
ngataagagctttctcgtn

SEQ ID NO: 852 - RNA, 19 nt, synthetic construct
  source 1..19: mol_type = other RNA
ctttctcgtttcagcttat

SEQ ID NO: 853 - RNA, 19 nt, synthetic construct
  source 1..19: mol_type = other RNA
ctttctcgtttcagcttaa

SEQ ID NO: 854 - RNA, 19 nt, synthetic construct
  source 1..19: mol_type = other RNA
ctttctcgtttcagcttan

SEQ ID NO: 855 - RNA, 19 nt, synthetic construct
  source 1..19: mol_type = other RNA
ntttctcgtttcagcttan

SEQ ID NO: 856 - RNA, 19 nt, synthetic construct
  source 1..19: mol_type = other RNA
gccataagcaccacattcc

SEQ ID NO: 857 - RNA, 19 nt, synthetic construct
  source 1..19: mol_type = other RNA
gccataagcaccacattct

SEQ ID NO: 858 - RNA, 19 nt, synthetic construct
  source 1..19: mol_type = other RNA
gccataagcaccacattca

SEQ ID NO: 859 - RNA, 19 nt, synthetic construct
  source 1..19: mol_type = other RNA
gccataagcaccacattcn

SEQ ID NO: 860 - RNA, 19 nt, synthetic construct
  source 1..19: mol_type = other RNA
nccataagcaccacattcn

SEQ ID NO: 861 - RNA, 19 nt, synthetic construct
  source 1..19: mol_type = other RNA
accacattcccttatactg

SEQ ID NO: 862 - RNA, 19 nt, synthetic construct
  source 1..19: mol_type = other RNA
accacattcccttatactt

SEQ ID NO: 863 - RNA, 19 nt, synthetic construct
  source 1..19: mol_type = other RNA
accacattcccttatacta

SEQ ID NO: 864 - RNA, 19 nt, synthetic construct
  source 1..19: mol_type = other RNA
accacattcccttatactn

SEQ ID NO: 865 - RNA, 19 nt, synthetic construct
  source 1..19: mol_type = other RNA
nccacattcccttatactn

SEQ ID NO: 866 - RNA, 19 nt, synthetic construct
  source 1..19: mol_type = other RNA
acagaacacaccaatactc

SEQ ID NO: 867 - RNA, 19 nt, synthetic construct
  source 1..19: mol_type = other RNA
acagaacacaccaatactt

SEQ ID NO: 868 - RNA, 19 nt, synthetic construct
  source 1..19: mol_type = other RNA
acagaacacaccaatacta

SEQ ID NO: 869 - RNA, 19 nt, synthetic construct
  source 1..19: mol_type = other RNA
acagaacacaccaatactn

SEQ ID NO: 870 - RNA, 19 nt, synthetic construct
  source 1..19: mol_type = other RNA
ncagaacacaccaatactn

SEQ ID NO: 871 - RNA, 19 nt, synthetic construct
  source 1..19: mol_type = other RNA
atgccttgaaacaatggaa

SEQ ID NO: 872 - RNA, 19 nt, synthetic construct
  source 1..19: mol_type = other RNA
atgccttgaaacaatggat

SEQ ID NO: 873 - RNA, 19 nt, synthetic construct
  source 1..19: mol_type = other RNA
atgccttgaaacaatggan

SEQ ID NO: 874 - RNA, 19 nt, synthetic construct
  source 1..19: mol_type = other RNA
ntgccttgaaacaatggan

SEQ ID NO: 875 - RNA, 19 nt, synthetic construct
  source 1..19: mol_type = other RNA
ccaacaccatagaagtctt

SEQ ID NO: 876 - RNA, 19 nt, synthetic construct
  source 1..19: mol_type = other RNA
ccaacaccatagaagtcta

SEQ ID NO: 877 - RNA, 19 nt, synthetic construct
  source 1..19: mol_type = other RNA
ccaacaccatagaagtctn

SEQ ID NO: 878 - RNA, 19 nt, synthetic construct
  source 1..19: mol_type = other RNA
ncaacaccatagaagtctn

SEQ ID NO: 879 - RNA, 19 nt, synthetic construct
  source 1..19: mol_type = other RNA
gtaagagacaacatgacca

SEQ ID NO: 880 - RNA, 19 nt, synthetic construct
  source 1..19: mol_type = other RNA
gtaagagacaacatgacct

SEQ ID NO: 881 - RNA, 19 nt, synthetic construct
  source 1..19: mol_type = other RNA
gtaagagacaacatgaccn

SEQ ID NO: 882 - RNA, 19 nt, synthetic construct
  source 1..19: mol_type = other RNA
ntaagagacaacatgaccn

SEQ ID NO: 883 - RNA, 19 nt, synthetic construct
  source 1..19: mol_type = other RNA
gcagattagaggtttcgta

SEQ ID NO: 884 - RNA, 19 nt, synthetic construct
  source 1..19: mol_type = other RNA
gcagattagaggtttcgtt

SEQ ID NO: 885 - RNA, 19 nt, synthetic construct
  source 1..19: mol_type = other RNA
gcagattagaggtttcgtn

SEQ ID NO: 886 - RNA, 19 nt, synthetic construct
  source 1..19: mol_type = other RNA
ncagattagaggtttcgtn

SEQ ID NO: 887 - RNA, 19 nt, synthetic construct
  source 1..19: mol_type = other RNA
gcatttgcgaaaagcttga

SEQ ID NO: 888 - RNA, 19 nt, synthetic construct
  source 1..19: mol_type = other RNA
gcatttgcgaaaagcttgt

SEQ ID NO: 889 - RNA, 19 nt, synthetic construct
  source 1..19: mol_type = other RNA
gcatttgcgaaaagcttgn

SEQ ID NO: 890 - RNA, 19 nt, synthetic construct
  source 1..19: mol_type = other RNA
ncatttgcgaaaagcttgn

SEQ ID NO: 891 - RNA, 19 nt, synthetic construct
  source 1..19: mol_type = other RNA
cgaaaagcttgaacagtct

SEQ ID NO: 892 - RNA, 19 nt, synthetic construct
  source 1..19: mol_type = other RNA
cgaaaagcttgaacagtca

SEQ ID NO: 893 - RNA, 19 nt, synthetic construct
  source 1..19: mol_type = other RNA
cgaaaagcttgaacagtcn

SEQ ID NO: 894 - RNA, 19 nt, synthetic construct
  source 1..19: mol_type = other RNA
ngaaaagcttgaacagtcn

SEQ ID NO: 895 - RNA, 19 nt, synthetic construct
  source 1..19: mol_type = other RNA
actggggacaacactaagt

SEQ ID NO: 896 - RNA, 19 nt, synthetic construct
  source 1..19: mol_type = other RNA
actggggacaacactaaga

SEQ ID NO: 897 - RNA, 19 nt, synthetic construct
  source 1..19: mol_type = other RNA
actggggacaacactaagn

SEQ ID NO: 898 - RNA, 19 nt, synthetic construct
  source 1..19: mol_type = other RNA
nctggggacaacactaagn

SEQ ID NO: 899 - RNA, 19 nt, synthetic construct
  source 1..19: mol_type = other RNA
caaaatggcaagactaggg

SEQ ID NO: 900 - RNA, 19 nt, synthetic construct
  source 1..19: mol_type = other RNA
caaaatggcaagactaggt

SEQ ID NO: 901 - RNA, 19 nt, synthetic construct
  source 1..19: mol_type = other RNA
caaaatggcaagactagga

SEQ ID NO: 902 - RNA, 19 nt, synthetic construct
  source 1..19: mol_type = other RNA
caaaatggcaagactaggn

SEQ ID NO: 903 - RNA, 19 nt, synthetic construct
  source 1..19: mol_type = other RNA
naaaatggcaagactaggn

SEQ ID NO: 904 - RNA, 19 nt, synthetic construct
  source 1..19: mol_type = other RNA
agtcctgggatgatgatgg

SEQ ID NO: 905 - RNA, 19 nt, synthetic construct
  source 1..19: mol_type = other RNA
agtcctgggatgatgatgt

SEQ ID NO: 906 - RNA, 19 nt, synthetic construct
  source 1..19: mol_type = other RNA
agtcctgggatgatgatga

SEQ ID NO: 907 - RNA, 19 nt, synthetic construct
  source 1..19: mol_type = other RNA
agtcctgggatgatgatgn

SEQ ID NO: 908 - RNA, 19 nt, synthetic construct
  source 1..19: mol_type = other RNA
agtcctgggatgatgatgn

SEQ ID NO: 909 - RNA, 19 nt, synthetic construct
  source 1..19: mol_type = other RNA
ggcatgttcaacatgctaa

SEQ ID NO: 910 - RNA, 19 nt, synthetic construct
  source 1..19: mol_type = other RNA
ggcatgttcaacatgctat

SEQ ID NO: 911 - RNA, 19 nt, synthetic construct
  source 1..19: mol_type = other RNA
ggcatgttcaacatgctan

SEQ ID NO: 912 - RNA, 19 nt, synthetic construct
  source 1..19: mol_type = other RNA
ngcatgttcaacatgctan

SEQ ID NO: 913 - RNA, 19 nt, synthetic construct
  source 1..19: mol_type = other RNA
tctcgatactgaatcttgg

SEQ ID NO: 914 - RNA, 19 nt, synthetic construct
  source 1..19: mol_type = other RNA
tctcgatactgaatcttgt

SEQ ID NO: 915 - RNA, 19 nt, synthetic construct
  source 1..19: mol_type = other RNA
tctcgatactgaatcttga

SEQ ID NO: 916 - RNA, 19 nt, synthetic construct
  source 1..19: mol_type = other RNA
tctcgatactgaatcttgn

SEQ ID NO: 917 - RNA, 19 nt, synthetic construct
  source 1..19: mol_type = other RNA
nctcgatactgaatcttgn

SEQ ID NO: 918 - RNA, 19 nt, synthetic construct
  source 1..19: mol_type = other RNA
ggagtggacagattctaca

SEQ ID NO: 919 - RNA, 19 nt, synthetic construct
  source 1..19: mol_type = other RNA
ggagtggacagattctact

SEQ ID NO: 920 - RNA, 19 nt, synthetic construct
  source 1..19: mol_type = other RNA
ggagtggacagattctacn

SEQ ID NO: 921 - RNA, 19 nt, synthetic construct
  source 1..19: mol_type = other RNA
ngagtggacagattctacn

SEQ ID NO: 922 - RNA, 19 nt, synthetic construct
  source 1..19: mol_type = other RNA
atttgtggctaattttagc

SEQ ID NO: 923 - RNA, 19 nt, synthetic construct
  source 1..19: mol_type = other RNA
atttgtggctaattttagt

SEQ ID NO: 924 - RNA, 19 nt, synthetic construct
  source 1..19: mol_type = other RNA
atttgtggctaattttaga

SEQ ID NO: 925 - RNA, 19 nt, synthetic construct
  source 1..19: mol_type = other RNA
atttgtggctaattttagn

SEQ ID NO: 926 - RNA, 19 nt, synthetic construct
  source 1..19: mol_type = other RNA
ntttgtggctaattttagn

SEQ ID NO: 927 - RNA, 19 nt, synthetic construct
  source 1..19: mol_type = other RNA
gtgataaagaacaacatga

SEQ ID NO: 928 - RNA, 19 nt, synthetic construct
  source 1..19: mol_type = other RNA
gtgataaagaacaacatgt

SEQ ID NO: 929 - RNA, 19 nt, synthetic construct
  source 1..19: mol_type = other RNA
gtgataaagaacaacatgn

SEQ ID NO: 930 - RNA, 19 nt, synthetic construct
  source 1..19: mol_type = other RNA
ntgataaagaacaacatgn

SEQ ID NO: 931 - RNA, 19 nt, synthetic construct
  source 1..19: mol_type = other RNA
gctcttcaattgttcatca

SEQ ID NO: 932 - RNA, 19 nt, synthetic construct
  source 1..19: mol_type = other RNA
gctcttcaattgttcatct

SEQ ID NO: 933 - RNA, 19 nt, synthetic construct
  source 1..19: mol_type = other RNA
gctcttcaattgttcatcn

SEQ ID NO: 934 - RNA, 19 nt, synthetic construct
  source 1..19: mol_type = other RNA
nctcttcaattgttcatcn

SEQ ID NO: 935 - RNA, 19 nt, synthetic construct
  source 1..19: mol_type = other RNA
gatggaggaccaaacttat

SEQ ID NO: 936 - RNA, 19 nt, synthetic construct
  source 1..19: mol_type = other RNA
gatggaggaccaaacttaa

SEQ ID NO: 937 - RNA, 19 nt, synthetic construct
  source 1..19: mol_type = other RNA
gatggaggaccaaacttan

SEQ ID NO: 938 - RNA, 19 nt, synthetic construct
  source 1..19: mol_type = other RNA
natggaggaccaaacttan

SEQ ID NO: 939 - RNA, 19 nt, synthetic construct
  source 1..19: mol_type = other RNA
aggatgaacagatgtacca

SEQ ID NO: 940 - RNA, 19 nt, synthetic construct
  source 1..19: mol_type = other RNA
aggatgaacagatgtacct

SEQ ID NO: 941 - RNA, 19 nt, synthetic construct
  source 1..19: mol_type = other RNA
aggatgaacagatgtaccn

SEQ ID NO: 942 - RNA, 19 nt, synthetic construct
  source 1..19: mol_type = other RNA
nggatgaacagatgtaccn

SEQ ID NO: 943 - RNA, 19 nt, synthetic construct
  source 1..19: mol_type = other RNA
ggaatttctagcatggtgg

SEQ ID NO: 944 - RNA, 19 nt, synthetic construct
  source 1..19: mol_type = other RNA
ggaatttctagcatggtgt

SEQ ID NO: 945 - RNA, 19 nt, synthetic construct
  source 1..19: mol_type = other RNA
ggaatttctagcatggtga

SEQ ID NO: 946 - RNA, 19 nt, synthetic construct
  source 1..19: mol_type = other RNA
ggaatttctagcatggtgn

SEQ ID NO: 947 - RNA, 19 nt, synthetic construct
  source 1..19: mol_type = other RNA
ngaatttctagcatggtgn

SEQ ID NO: 948 - RNA, 19 nt, synthetic construct
  source 1..19: mol_type = other RNA
tcaagaaagaagagttctc

SEQ ID NO: 949 - RNA, 19 nt, synthetic construct
  source 1..19: mol_type = other RNA
tcaagaaagaagagttctt

SEQ ID NO: 950 - RNA, 19 nt, synthetic construct
  source 1..19: mol_type = other RNA
tcaagaaagaagagttcta

SEQ ID NO: 951 - RNA, 19 nt, synthetic construct
  source 1..19: mol_type = other RNA
tcaagaaagaagagttctn

SEQ ID NO: 952 - RNA, 19 nt, synthetic construct
  source 1..19: mol_type = other RNA
ncaagaaagaagagttctn

SEQ ID NO: 953 - RNA, 19 nt, synthetic construct
  source 1..19: mol_type = other RNA
agatcatgaagatctgttc

SEQ ID NO: 954 - RNA, 19 nt, synthetic construct
  source 1..19: mol_type = other RNA
agatcatgaagatctgttt

SEQ ID NO: 955 - RNA, 19 nt, synthetic construct
  source 1..19: mol_type = other RNA
agatcatgaagatctgtta

SEQ ID NO: 956 - RNA, 19 nt, synthetic construct
  source 1..19: mol_type = other RNA
agatcatgaagatctgttn

SEQ ID NO: 957 - RNA, 19 nt, synthetic construct
  source 1..19: mol_type = other RNA
ngatcatgaagatctgttn

SEQ ID NO: 958 - RNA, 19 nt, synthetic construct
  source 1..19: mol_type = other RNA
atctgttccaccattgaag

SEQ ID NO: 959 - RNA, 19 nt, synthetic construct
  source 1..19: mol_type = other RNA
atctgttccaccattgaat

SEQ ID NO: 960 - RNA, 19 nt, synthetic construct
  source 1..19: mol_type = other RNA
atctgttccaccattgaaa

SEQ ID NO: 961 - RNA, 19 nt, synthetic construct
  source 1..19: mol_type = other RNA
atctgttccaccattgaan

SEQ ID NO: 962 - RNA, 19 nt, synthetic construct
  source 1..19: mol_type = other RNA
ntctgttccaccattgaan

SEQ ID NO: 963 - RNA, 19 nt, synthetic construct
  source 1..19: mol_type = other RNA
ccaccattgaagaactcag

SEQ ID NO: 964 - RNA, 19 nt, synthetic construct
  source 1..19: mol_type = other RNA
ccaccattgaagaactcat

SEQ ID NO: 965 - RNA, 19 nt, synthetic construct
  source 1..19: mol_type = other RNA
ccaccattgaagaactcaa

SEQ ID NO: 966 - RNA, 19 nt, synthetic construct
  source 1..19: mol_type = other RNA
ccaccattgaagaactcan

SEQ ID NO: 967 - RNA, 19 nt, synthetic construct
  source 1..19: mol_type = other RNA
ncaccattgaagaactcan

SEQ ID NO: 968 - RNA, 19 nt, synthetic construct
  source 1..19: mol_type = other RNA
gagatactcactaagacca

SEQ ID NO: 969 - RNA, 19 nt, synthetic construct
  source 1..19: mol_type = other RNA
gagatactcactaagacct

SEQ ID NO: 970 - RNA, 19 nt, synthetic construct
  source 1..19: mol_type = other RNA
gagatactcactaagaccn

SEQ ID NO: 971 - RNA, 19 nt, synthetic construct
  source 1..19: mol_type = other RNA
nagatactcactaagaccn

SEQ ID NO: 972 - RNA, 19 nt, synthetic construct
  source 1..19: mol_type = other RNA
tcgaaaggttgaaacatgg

SEQ ID NO: 973 - RNA, 19 nt, synthetic construct
  source 1..19: mol_type = other RNA
tcgaaaggttgaaacatgt

SEQ ID NO: 974 - RNA, 19 nt, synthetic construct
  source 1..19: mol_type = other RNA
tcgaaaggttgaaacatga

SEQ ID NO: 975 - RNA, 19 nt, synthetic construct
  source 1..19: mol_type = other RNA
tcgaaaggttgaaacatgn

SEQ ID NO: 976 - RNA, 19 nt, synthetic construct
  source 1..19: mol_type = other RNA
tcgaaaggttgaaacatgn

SEQ ID NO: 977 - RNA, 19 nt, synthetic construct
  source 1..19: mol_type = other RNA
atggtggcgtacatgctag

SEQ ID NO: 978 - RNA, 19 nt, synthetic construct
  source 1..19: mol_type = other RNA
atggtggcgtacatgctat

SEQ ID NO: 979 - RNA, 19 nt, synthetic construct
  source 1..19: mol_type = other RNA
atggtggcgtacatgctaa

SEQ ID NO: 980 - RNA, 19 nt, synthetic construct
  source 1..19: mol_type = other RNA
atggtggcgtacatgctan

SEQ ID NO: 981 - RNA, 19 nt, synthetic construct
  source 1..19: mol_type = other RNA
ntggtggcgtacatgctan

SEQ ID NO: 982 - RNA, 19 nt, synthetic construct
  source 1..19: mol_type = other RNA
gctgctagaaacatagtaa

SEQ ID NO: 983 - RNA, 19 nt, synthetic construct
  source 1..19: mol_type = other RNA
gctgctagaaacatagtat

SEQ ID NO: 984 - RNA, 19 nt, synthetic construct
  source 1..19: mol_type = other RNA
gctgctagaaacatagtan

SEQ ID NO: 985 - RNA, 19 nt, synthetic construct
  source 1..19: mol_type = other RNA
nctgctagaaacatagtan

SEQ ID NO: 986 - RNA, 19 nt, synthetic construct
  source 1..19: mol_type = other RNA
gacaagcggatcatcagtc

SEQ ID NO: 987 - RNA, 19 nt, synthetic construct
  source 1..19: mol_type = other RNA
gacaagcggatcatcagtt

SEQ ID NO: 988 - RNA, 19 nt, synthetic construct
  source 1..19: mol_type = other RNA
gacaagcggatcatcagta

SEQ ID NO: 989 - RNA, 19 nt, synthetic construct
  source 1..19: mol_type = other RNA
gacaagcggatcatcagtn

SEQ ID NO: 990 - RNA, 19 nt, synthetic construct
  source 1..19: mol_type = other RNA
nacaagcggatcatcagtn

SEQ ID NO: 991 - RNA, 19 nt, synthetic construct
  source 1..19: mol_type = other RNA
gaggattgcatgatcaagg

SEQ ID NO: 992 - RNA, 19 nt, synthetic construct
  source 1..19: mol_type = other RNA
gaggattgcatgatcaagt

SEQ ID NO: 993 - RNA, 19 nt, synthetic construct
  source 1..19: mol_type = other RNA
gaggattgcatgatcaaga

SEQ ID NO: 994 - RNA, 19 nt, synthetic construct
  source 1..19: mol_type = other RNA
gaggattgcatgatcaagn

SEQ ID NO: 995 - RNA, 19 nt, synthetic construct
  source 1..19: mol_type = other RNA
naggattgcatgatcaagn

SEQ ID NO: 996 - RNA, 19 nt, synthetic construct
  source 1..19: mol_type = other RNA
gtggtagtgagtattgacc

SEQ ID NO: 997 - RNA, 19 nt, synthetic construct
  source 1..19: mol_type = other RNA
gtggtagtgagtattgact

SEQ ID NO: 998 - RNA, 19 nt, synthetic construct
  source 1..19: mol_type = other RNA
gtggtagtgagtattgaca

SEQ ID NO: 999 - RNA, 19 nt, synthetic construct
  source 1..19: mol_type = other RNA
gtggtagtgagtattgacn

SEQ ID NO: 1000 - RNA, 19 nt, synthetic construct
  source 1..19: mol_type = other RNA
ntggtagtgagtattgacn

SEQ ID NO: 1001 - RNA, 19 nt, synthetic construct
  source 1..19: mol_type = other RNA
agggaacgtactattgtct

SEQ ID NO: 1002 - RNA, 19 nt, synthetic construct
  source 1..19: mol_type = other RNA
agggaacgtactattgtca

SEQ ID NO: 1003 - RNA, 19 nt, synthetic construct
  source 1..19: mol_type = other RNA
agggaacgtactattgtcn

SEQ ID NO: 1004 - RNA, 19 nt, synthetic construct
  source 1..19: mol_type = other RNA
ngggaacgtactattgtcn

SEQ ID NO: 1005 - RNA, 19 nt, synthetic construct
  source 1..19: mol_type = other RNA
tgatgtgggagatcaatgg

SEQ ID NO: 1006 - RNA, 19 nt, synthetic construct
  source 1..19: mol_type = other RNA
tgatgtgggagatcaatgt

SEQ ID NO: 1007 - RNA, 19 nt, synthetic construct
  source 1..19: mol_type = other RNA
tgatgtgggagatcaatga

SEQ ID NO: 1008 - RNA, 19 nt, synthetic construct
  source 1..19: mol_type = other RNA
tgatgtgggagatcaatgn

SEQ ID NO: 1009 - RNA, 19 nt, synthetic construct
  source 1..19: mol_type = other RNA
ngatgtgggagatcaatgn

SEQ ID NO: 1010 - RNA, 19 nt, synthetic construct
  source 1..19: mol_type = other RNA
tcgtaaggacactgttcca

SEQ ID NO: 1011 - RNA, 19 nt, synthetic construct
  source 1..19: mol_type = other RNA
tcgtaaggacactgttcct

SEQ ID NO: 1012 - RNA, 19 nt, synthetic construct
  source 1..19: mol_type = other RNA
tcgtaaggacactgttccn

SEQ ID NO: 1013 - RNA, 19 nt, synthetic construct
  source 1..19: mol_type = other RNA
ncgtaaggacactgttccn

SEQ ID NO: 1014 - RNA, 19 nt, synthetic construct
  source 1..19: mol_type = other RNA
cagtattcaattacaacaa

SEQ ID NO: 1015 - RNA, 19 nt, synthetic construct
  source 1..19: mol_type = other RNA
cagtattcaattacaacat

SEQ ID NO: 1016 - RNA, 19 nt, synthetic construct
  source 1..19: mol_type = other RNA
cagtattcaattacaacan

SEQ ID NO: 1017 - RNA, 19 nt, synthetic construct
  source 1..19: mol_type = other RNA
nagtattcaattacaacan

SEQ ID NO: 1018 - RNA, 19 nt, synthetic construct
  source 1..19: mol_type = other RNA
gactctagcatacttactg

SEQ ID NO: 1019 - RNA, 19 nt, synthetic construct
  source 1..19: mol_type = other RNA
gactctagcatacttactt

SEQ ID NO: 1020 - RNA, 19 nt, synthetic construct
  source 1..19: mol_type = other RNA
gactctagcatacttacta

SEQ ID NO: 1021 - RNA, 19 nt, synthetic construct
  source 1..19: mol_type = other RNA
gactctagcatacttactn

SEQ ID NO: 1022 - RNA, 19 nt, synthetic construct
  source 1..19: mol_type = other RNA
nactctagcatacttactn

SEQ ID NO: 1023 - RNA, 19 nt, synthetic construct
  source 1..19: mol_type = other RNA
gtcggaagaatgattggtg

SEQ ID NO: 1024 - RNA, 19 nt, synthetic construct
  source 1..19: mol_type = other RNA
gtcggaagaatgattggtt

SEQ ID NO: 1025 - RNA, 19 nt, synthetic construct
  source 1..19: mol_type = other RNA
gtcggaagaatgattggta

SEQ ID NO: 1026 - RNA, 19 nt, synthetic construct
  source 1..19: mol_type = other RNA
gtcggaagaatgattggtn

SEQ ID NO: 1027 - RNA, 19 nt, synthetic construct
  source 1..19: mol_type = other RNA
ntcggaagaatgattggtn

SEQ ID NO: 1028 - RNA, 19 nt, synthetic construct
  source 1..19: mol_type = other RNA
gactaatccagaatagcat

SEQ ID NO: 1029 - RNA, 19 nt, synthetic construct
  source 1..19: mol_type = other RNA
gactaatccagaatagcaa

SEQ ID NO: 1030 - RNA, 19 nt, synthetic construct
  source 1..19: mol_type = other RNA
gactaatccagaatagcan

SEQ ID NO: 1031 - RNA, 19 nt, synthetic construct
  source 1..19: mol_type = other RNA
nactaatccagaatagcan

SEQ ID NO: 1032 - RNA, 19 nt, synthetic construct
  source 1..19: mol_type = other RNA
agaggatggtgctttctgc

SEQ ID NO: 1033 - RNA, 19 nt, synthetic construct
  source 1..19: mol_type = other RNA
agaggatggtgctttctgt

SEQ ID NO: 1034 - RNA, 19 nt, synthetic construct
  source 1..19: mol_type = other RNA
agaggatggtgctttctga

SEQ ID NO: 1035 - RNA, 19 nt, synthetic construct
  source 1..19: mol_type = other RNA
agaggatggtgctttctgn

SEQ ID NO: 1036 - RNA, 19 nt, synthetic construct
  source 1..19: mol_type = other RNA
ngaggatggtgctttctgn

SEQ ID NO: 1037 - RNA, 19 nt, synthetic construct
  source 1..19: mol_type = other RNA
actcatatcatgatttggc

SEQ ID NO: 1038 - RNA, 19 nt, synthetic construct
  source 1..19: mol_type = other RNA
actcatatcatgatttggt

SEQ ID NO: 1039 - RNA, 19 nt, synthetic construct
  source 1..19: mol_type = other RNA
actcatatcatgatttgga

SEQ ID NO: 1040 - RNA, 19 nt, synthetic construct
  source 1..19: mol_type = other RNA
actcatatcatgatttggn

SEQ ID NO: 1041 - RNA, 19 nt, synthetic construct
  source 1..19: mol_type = other RNA
nctcatatcatgatttggn

SEQ ID NO: 1042 - RNA, 19 nt, synthetic construct
  source 1..19: mol_type = other RNA
gaatgatgccacatatcag

SEQ ID NO: 1043 - RNA, 19 nt, synthetic construct
  source 1..19: mol_type = other RNA
gaatgatgccacatatcat

SEQ ID NO: 1044 - RNA, 19 nt, synthetic construct
  source 1..19: mol_type = other RNA
gaatgatgccacatatcaa

SEQ ID NO: 1045 - RNA, 19 nt, synthetic construct
  source 1..19: mol_type = other RNA
gaatgatgccacatatcan

SEQ ID NO: 1046 - RNA, 19 nt, synthetic construct
  source 1..19: mol_type = other RNA
naatgatgccacatatcan

SEQ ID NO: 1047 - RNA, 19 nt, synthetic construct
  source 1..19: mol_type = other RNA
tctaatgcaaggttcaaca

SEQ ID NO: 1048 - RNA, 19 nt, synthetic construct
  source 1..19: mol_type = other RNA
tctaatgcaaggttcaact

SEQ ID NO: 1049 - RNA, 19 nt, synthetic construct
  source 1..19: mol_type = other RNA
tctaatgcaaggttcaacn

SEQ ID NO: 1050 - RNA, 19 nt, synthetic construct
  source 1..19: mol_type = other RNA
nctaatgcaaggttcaacn

SEQ ID NO: 1051 - RNA, 19 nt, synthetic construct
  source 1..19: mol_type = other RNA
tcagaatgatcaaacgtgg

SEQ ID NO: 1052 - RNA, 19 nt, synthetic construct
  source 1..19: mol_type = other RNA
tcagaatgatcaaacgtgt

SEQ ID NO: 1053 - RNA, 19 nt, synthetic construct
  source 1..19: mol_type = other RNA
tcagaatgatcaaacgtga

SEQ ID NO: 1054 - RNA, 19 nt, synthetic construct
  source 1..19: mol_type = other RNA
tcagaatgatcaaacgtgn

SEQ ID NO: 1055 - RNA, 19 nt, synthetic construct
  source 1..19: mol_type = other RNA
ncagaatgatcaaacgtgn

SEQ ID NO: 1056 - RNA, 19 nt, synthetic construct
  source 1..19: mol_type = other RNA
caatgaccgaaatttctgg

SEQ ID NO: 1057 - RNA, 19 nt, synthetic construct
  source 1..19: mol_type = other RNA
caatgaccgaaatttctgt

SEQ ID NO: 1058 - RNA, 19 nt, synthetic construct
  source 1..19: mol_type = other RNA
caatgaccgaaatttctga

SEQ ID NO: 1059 - RNA, 19 nt, synthetic construct
  source 1..19: mol_type = other RNA
caatgaccgaaatttctgn

SEQ ID NO: 1060 - RNA, 19 nt, synthetic construct
  source 1..19: mol_type = other RNA
naatgaccgaaatttctgn

SEQ ID NO: 1061 - RNA, 19 nt, synthetic construct
  source 1..19: mol_type = other RNA
tgtgcaatatcctcaaagg

SEQ ID NO: 1062 - RNA, 19 nt, synthetic construct
  source 1..19: mol_type = other RNA
tgtgcaatatcctcaaagt

SEQ ID NO: 1063 - RNA, 19 nt, synthetic construct
  source 1..19: mol_type = other RNA
tgtgcaatatcctcaaaga

SEQ ID NO: 1064 - RNA, 19 nt, synthetic construct
  source 1..19: mol_type = other RNA
tgtgcaatatcctcaaagn

SEQ ID NO: 1065 - RNA, 19 nt, synthetic construct
  source 1..19: mol_type = other RNA
ngtgcaatatcctcaaagn

SEQ ID NO: 1066 - RNA, 19 nt, synthetic construct
  source 1..19: mol_type = other RNA
ggtcagcactcattctgag

SEQ ID NO: 1067 - RNA, 19 nt, synthetic construct
  source 1..19: mol_type = other RNA
ggtcagcactcattctgat

SEQ ID NO: 1068 - RNA, 19 nt, synthetic construct
  source 1..19: mol_type = other RNA
ggtcagcactcattctgaa

SEQ ID NO: 1069 - RNA, 19 nt, synthetic construct
  source 1..19: mol_type = other RNA
ggtcagcactcattctgan

SEQ ID NO: 1070 - RNA, 19 nt, synthetic construct
  source 1..19: mol_type = other RNA
ngtcagcactcattctgan

SEQ ID NO: 1071 - RNA, 19 nt, synthetic construct
  source 1..19: mol_type = other RNA
atcagttgcacataaatcc

SEQ ID NO: 1072 - RNA, 19 nt, synthetic construct
  source 1..19: mol_type = other RNA
atcagttgcacataaatct

SEQ ID NO: 1073 - RNA, 19 nt, synthetic construct
  source 1..19: mol_type = other RNA
atcagttgcacataaatca

SEQ ID NO: 1074 - RNA, 19 nt, synthetic construct
  source 1..19: mol_type = other RNA
atcagttgcacataaatcn

SEQ ID NO: 1075 - RNA, 19 nt, synthetic construct
  source 1..19: mol_type = other RNA
ntcagttgcacataaatcn

SEQ ID NO: 1076 - RNA, 19 nt, synthetic construct
  source 1..19: mol_type = other RNA
tcacaagagtcaattggtg

SEQ ID NO: 1077 - RNA, 19 nt, synthetic construct
  source 1..19: mol_type = other RNA
tcacaagagtcaattggtt

SEQ ID NO: 1078 - RNA, 19 nt, synthetic construct
  source 1..19: mol_type = other RNA
tcacaagagtcaattggta

SEQ ID NO: 1079 - RNA, 19 nt, synthetic construct
  source 1..19: mol_type = other RNA
tcacaagagtcaattggtn

SEQ ID NO: 1080 - RNA, 19 nt, synthetic construct
  source 1..19: mol_type = other RNA
ncacaagagtcaattggtn

SEQ ID NO: 1081 - RNA, 19 nt, synthetic construct
  source 1..19: mol_type = other RNA
gtatcaagtttcataagag

SEQ ID NO: 1082 - RNA, 19 nt, synthetic construct
  source 1..19: mol_type = other RNA
gtatcaagtttcataagat

SEQ ID NO: 1083 - RNA, 19 nt, synthetic construct
  source 1..19: mol_type = other RNA
gtatcaagtttcataagaa

SEQ ID NO: 1084 - RNA, 19 nt, synthetic construct
  source 1..19: mol_type = other RNA
gtatcaagtttcataagan

SEQ ID NO: 1085 - RNA, 19 nt, synthetic construct
  source 1..19: mol_type = other RNA
ntatcaagtttcataagan

SEQ ID NO: 1086 - RNA, 19 nt, synthetic construct
  source 1..19: mol_type = other RNA
tgtgcagcctacattctca

SEQ ID NO: 1087 - RNA, 19 nt, synthetic construct
  source 1..19: mol_type = other RNA
tgtgcagcctacattctct

SEQ ID NO: 1088 - RNA, 19 nt, synthetic construct
  source 1..19: mol_type = other RNA
tgtgcagcctacattctcn

SEQ ID NO: 1089 - RNA, 19 nt, synthetic construct
  source 1..19: mol_type = other RNA
ngtgcagcctacattctcn

SEQ ID NO: 1090 - RNA, 19 nt, synthetic construct
  source 1..19: mol_type = other RNA
cttcctttgacatgagtaa

SEQ ID NO: 1091 - RNA, 19 nt, synthetic construct
  source 1..19: mol_type = other RNA
cttcctttgacatgagtat

SEQ ID NO: 1092 - RNA, 19 nt, synthetic construct
  source 1..19: mol_type = other RNA
cttcctttgacatgagtan

SEQ ID NO: 1093 - RNA, 19 nt, synthetic construct
  source 1..19: mol_type = other RNA
nttcctttgacatgagtan

SEQ ID NO: 1094 - RNA, 19 nt, synthetic construct
  source 1..19: mol_type = other RNA
aatgaagggtcttatttct

SEQ ID NO: 1095 - RNA, 19 nt, synthetic construct
  source 1..19: mol_type = other RNA
aatgaagggtcttatttca

SEQ ID NO: 1096 - RNA, 19 nt, synthetic construct
  source 1..19: mol_type = other RNA
aatgaagggtcttatttcn

SEQ ID NO: 1097 - RNA, 19 nt, synthetic construct
  source 1..19: mol_type = other RNA
natgaagggtcttatttcn

SEQ ID NO: 1098 - RNA, 19 nt, synthetic construct
  source 1..19: mol_type = other RNA
ctttgtgcgacaatgcttc

SEQ ID NO: 1099 - RNA, 19 nt, synthetic construct
  source 1..19: mol_type = other RNA
ctttgtgcgacaatgcttt

SEQ ID NO: 1100 - RNA, 19 nt, synthetic construct
  source 1..19: mol_type = other RNA
ctttgtgcgacaatgctta

SEQ ID NO: 1101 - RNA, 19 nt, synthetic construct
  source 1..19: mol_type = other RNA
ctttgtgcgacaatgcttn

SEQ ID NO: 1102 - RNA, 19 nt, synthetic construct
  source 1..19: mol_type = other RNA
ntttgtgcgacaatgcttn

SEQ ID NO: 1103 - RNA, 19 nt, synthetic construct
  source 1..19: mol_type = other RNA
tattcggatttccatttca

SEQ ID NO: 1104 - RNA, 19 nt, synthetic construct
  source 1..19: mol_type = other RNA
tattcggatttccatttct

SEQ ID NO: 1105 - RNA, 19 nt, synthetic construct
  source 1..19: mol_type = other RNA
tattcggatttccatttcn

SEQ ID NO: 1106 - RNA, 19 nt, synthetic construct
  source 1..19: mol_type = other RNA
nattcggatttccatttcn

SEQ ID NO: 1107 - RNA, 19 nt, synthetic construct
  source 1..19: mol_type = other RNA
ggaagagaccgaatcatgg

SEQ ID NO: 1108 - RNA, 19 nt, synthetic construct
  source 1..19: mol_type = other RNA
ggaagagaccgaatcatgt

SEQ ID NO: 1109 - RNA, 19 nt, synthetic construct
  source 1..19: mol_type = other RNA
ggaagagaccgaatcatga

SEQ ID NO: 1110 - RNA, 19 nt, synthetic construct
  source 1..19: mol_type = other RNA
ggaagagaccgaatcatgn

SEQ ID NO: 1111 - RNA, 19 nt, synthetic construct
  source 1..19: mol_type = other RNA
ngaagagaccgaatcatgn

SEQ ID NO: 1112 - RNA, 19 nt, synthetic construct
  source 1..19: mol_type = other RNA
atcaaaactaggcttttca

SEQ ID NO: 1113 - RNA, 19 nt, synthetic construct
  source 1..19: mol_type = other RNA
atcaaaactaggcttttct

SEQ ID NO: 1114 - RNA, 19 nt, synthetic construct
  source 1..19: mol_type = other RNA
atcaaaactaggcttttcn

SEQ ID NO: 1115 - RNA, 19 nt, synthetic construct
  source 1..19: mol_type = other RNA
ntcaaaactaggcttttcn

SEQ ID NO: 1116 - RNA, 19 nt, synthetic construct
  source 1..19: mol_type = other RNA
ctatgggattcctttcgtc

SEQ ID NO: 1117 - RNA, 19 nt, synthetic construct
  source 1..19: mol_type = other RNA
ctatgggattcctttcgtt

SEQ ID NO: 1118 - RNA, 19 nt, synthetic construct
  source 1..19: mol_type = other RNA
ctatgggattcctttcgta

SEQ ID NO: 1119 - RNA, 19 nt, synthetic construct
  source 1..19: mol_type = other RNA
ctatgggattcctttcgtn

SEQ ID NO: 1120 - RNA, 19 nt, synthetic construct
  source 1..19: mol_type = other RNA
ntatgggattcctttcgtn

SEQ ID NO: 1121 - RNA, 19 nt, synthetic construct
  source 1..19: mol_type = other RNA
ggcgaagagacaattgaag

SEQ ID NO: 1122 - RNA, 19 nt, synthetic construct
  source 1..19: mol_type = other RNA
ggcgaagagacaattgaat

SEQ ID NO: 1123 - RNA, 19 nt, synthetic construct
  source 1..19: mol_type = other RNA
ggcgaagagacaattgaaa

SEQ ID NO: 1124 - RNA, 19 nt, synthetic construct
  source 1..19: mol_type = other RNA
ggcgaagagacaattgaan

SEQ ID NO: 1125 - RNA, 19 nt, synthetic construct
  source 1..19: mol_type = other RNA
ngcgaagagacaattgaan

SEQ ID NO: 1126 - RNA, 19 nt, synthetic construct
  source 1..19: mol_type = other RNA
ctatgtagatggattcgag

SEQ ID NO: 1127 - RNA, 19 nt, synthetic construct
  source 1..19: mol_type = other RNA
ctatgtagatggattcgat

SEQ ID NO: 1128 - RNA, 19 nt, synthetic construct
  source 1..19: mol_type = other RNA
ctatgtagatggattcgaa

SEQ ID NO: 1129 - RNA, 19 nt, synthetic construct
  source 1..19: mol_type = other RNA
ctatgtagatggattcgan

SEQ ID NO: 1130 - RNA, 19 nt, synthetic construct
  source 1..19: mol_type = other RNA
ntatgtagatggattcgan

SEQ ID NO: 1131 - RNA, 19 nt, synthetic construct
  source 1..19: mol_type = other RNA
caagctttcccaaatgtca

SEQ ID NO: 1132 - RNA, 19 nt, synthetic construct
  source 1..19: mol_type = other RNA
caagctttcccaaatgtct

SEQ ID NO: 1133 - RNA, 19 nt, synthetic construct
  source 1..19: mol_type = other RNA
caagctttcccaaatgtcn

SEQ ID NO: 1134 - RNA, 19 nt, synthetic construct
  source 1..19: mol_type = other RNA
naagctttcccaaatgtcn

SEQ ID NO: 1135 - RNA, 19 nt, synthetic construct
  source 1..19: mol_type = other RNA
actatatgatgcaatcaaa

SEQ ID NO: 1136 - RNA, 19 nt, synthetic construct
  source 1..19: mol_type = other RNA
actatatgatgcaatcaat

SEQ ID NO: 1137 - RNA, 19 nt, synthetic construct
  source 1..19: mol_type = other RNA
actatatgatgcaatcaan

SEQ ID NO: 1138 - RNA, 19 nt, synthetic construct
  source 1..19: mol_type = other RNA
nctatatgatgcaatcaan

SEQ ID NO: 1139 - RNA, 19 nt, synthetic construct
  source 1..19: mol_type = other RNA
caaagatgttggagacctt

SEQ ID NO: 1140 - RNA, 19 nt, synthetic construct
  source 1..19: mol_type = other RNA
caaagatgttggagaccta

SEQ ID NO: 1141 - RNA, 19 nt, synthetic construct
  source 1..19: mol_type = other RNA
caaagatgttggagacctn

SEQ ID NO: 1142 - RNA, 19 nt, synthetic construct
  source 1..19: mol_type = other RNA
naaagatgttggagacctn

SEQ ID NO: 1143 - RNA, 19 nt, synthetic construct
  source 1..19: mol_type = other RNA
gctggatagaacttgatga

SEQ ID NO: 1144 - RNA, 19 nt, synthetic construct
  source 1..19: mol_type = other RNA
gctggatagaacttgatgt

SEQ ID NO: 1145 - RNA, 19 nt, synthetic construct
  source 1..19: mol_type = other RNA
gctggatagaacttgatgn

SEQ ID NO: 1146 - RNA, 19 nt, synthetic construct
  source 1..19: mol_type = other RNA
nctggatagaacttgatgn

SEQ ID NO: 1147 - RNA, 19 nt, synthetic construct
  source 1..19: mol_type = other RNA
cccaatgataagcaaatgt

SEQ ID NO: 1148 - RNA, 19 nt, synthetic construct
  source 1..19: mol_type = other RNA
cccaatgataagcaaatga

SEQ ID NO: 1149 - RNA, 19 nt, synthetic construct
  source 1..19: mol_type = other RNA
cccaatgataagcaaatgn

SEQ ID NO: 1150 - RNA, 19 nt, synthetic construct
  source 1..19: mol_type = other RNA
nccaatgataagcaaatgn

SEQ ID NO: 1151 - RNA, 19 nt, synthetic construct
  source 1..19: mol_type = other RNA
aggagtgcctgattaatga

SEQ ID NO: 1152 - RNA, 19 nt, synthetic construct
  source 1..19: mol_type = other RNA
aggagtgcctgattaatgt

SEQ ID NO: 1153 - RNA, 19 nt, synthetic construct
  source 1..19: mol_type = other RNA
aggagtgcctgattaatgn

SEQ ID NO: 1154 - RNA, 19 nt, synthetic construct
  source 1..19: mol_type = other RNA
nggagtgcctgattaatgn

SEQ ID NO: 1155 - RNA, 21 nt, synthetic construct
  modified_base 1: mod_base = um
  modified_base 1^2: mod_base = OTHER; note = phosphorothioate linkage
  modified_base 2: mod_base = OTHER; note = 2'-fluorouridine
  modified_base 2^3: mod_base = OTHER; note = phosphorothioate linkage
  modified_base 3: mod_base = OTHER; note = 2'-O-methyladenosine
  modified_base 3^4: mod_base = OTHER; note = phosphorothioate linkage
  modified_base 4: mod_base = OTHER; note = 2'-fluorocytidine
  modified_base 5: mod_base = gm
  modified_base 6: mod_base = OTHER; note = 2'-fluorouridine
  modified_base 7: mod_base = um
  modified_base 8: mod_base = um
  modified_base 9: mod_base = cm
  modified_base 10: mod_base = gm
  modified_base 11: mod_base = OTHER; note = 2'-O-methyladenosine
  modified_base 12: mod_base = OTHER; note = 2'-fluorocytidine
  modified_base 13: mod_base = cm
  modified_base 14: mod_base = OTHER; note = 2'-fluorouridine
  modified_base 15: mod_base = cm
  modified_base 16: mod_base = OTHER; note = 2'-fluoroguanosine
  modified_base 17: mod_base = gm
  modified_base 18: mod_base = OTHER; note = 2'-fluorouridine
  modified_base 19: mod_base = um
  modified_base 20: mod_base = OTHER; note = 2'-O-methyladenosine
  modified_base 20^21: mod_base = OTHER; note = phosphorothioate linkage
  modified_base 21: mod_base = gm
  source 1..21: mol_type = other RNA
ttacgtttcgacctcggttag

SEQ ID NO: 1156 - RNA, 21 nt, synthetic construct
  modified_base 1: mod_base = um
  modified_base 1^2: mod_base = OTHER; note = phosphorothioate linkage
  modified_base 2: mod_base = OTHER; note = 2'-fluoroadenosine
  modified_base 2^3: mod_base = OTHER; note = phosphorothioate linkage
  modified_base 3: mod_base = um
  modified_base 3^4: mod_base = OTHER; note = phosphorothioate linkage
  modified_base 4: mod_base = OTHER; note = 2'-fluoroguanosine
  modified_base 5: mod_base = OTHER; note = 2'-O-methyladenosine
  modified_base 6: mod_base = OTHER; note = 2'-fluorouridine
  modified_base 7: mod_base = OTHER; note = 2'-O-methyladenosine
  modified_base 8: mod_base = gm
  modified_base 9: mod_base = OTHER; note = 2'-O-methyladenosine
  modified_base 10: mod_base = OTHER; note = 2'-O-methyladenosine
  modified_base 11: mod_base = OTHER; note = 2'-O-methyladenosine
  modified_base 12: mod_base = OTHER; note = 2'-fluoroguanosine
  modified_base 13: mod_base = OTHER; note = 2'-O-methyladenosine
  modified_base 14: mod_base = OTHER; note = 2'-fluoroadenosine
  modified_base 15: mod_base = cm
  modified_base 16: mod_base = OTHER; note = 2'-fluoroguanosine
  modified_base 17: mod_base = um
  modified_base 18: mod_base = OTHER; note = 2'-fluoroadenosine
  modified_base 19: mod_base = cm
  modified_base 20: mod_base = gm
  modified_base 20^21: mod_base = OTHER; note = phosphorothioate linkage
  modified_base 21: mod_base = um
  source 1..21: mol_type = other RNA
tatgatagaaagaacgtacgt

SEQ ID NO: 1157 - RNA, 21 nt, synthetic construct
  modified_base 1: mod_base = um
  modified_base 1^2: mod_base = OTHER; note = phosphorothioate linkage
  modified_base 2: mod_base = OTHER; note = 2'-fluorouridine
  modified_base 2^3: mod_base = OTHER; note = phosphorothioate linkage
  modified_base 3: mod_base = gm
  modified_base 3^4: mod_base = OTHER; note = phosphorothioate linkage
  modified_base 4: mod_base = OTHER; note = 2'-fluoroadenosine
  modified_base 5: mod_base = cm
  modified_base 6: mod_base = OTHER; note = 2'-fluoroadenosine
  modified_base 7: mod_base = OTHER; note = 2'-O-methyladenosine
  modified_base 8: mod_base = gm
  modified_base 9: mod_base = OTHER; note = 2'-O-methyladenosine
  modified_base 10: mod_base = um
  modified_base 11: mod_base = um
  modified_base 12: mod_base = OTHER; note = 2'-fluoroguanosine
  modified_base 13: mod_base = gm
  modified_base 14: mod_base = OTHER; note = 2'-fluorouridine
  modified_base 15: mod_base = cm
  modified_base 16: mod_base = OTHER; note = 2'-fluorouridine
  modified_base 17: mod_base = um
  modified_base 18: mod_base = OTHER; note = 2'-fluoroguanosine
  modified_base 19: mod_base = um
  modified_base 20: mod_base = cm
  modified_base 20^21: mod_base = OTHER; note = phosphorothioate linkage
  modified_base 21: mod_base = um
  source 1..21: mol_type = other RNA
ttgacaagattggtcttgtct

SEQ ID NO: 1158 - RNA, 21 nt, synthetic construct
  modified_base 1: mod_base = OTHER; note = 2'-O-methyladenosine
  modified_base 1^2: mod_base = OTHER; note = phosphorothioate linkage
  modified_base 2: mod_base = OTHER; note = 2'-fluoroguanosine
  modified_base 2^3: mod_base = OTHER; note = phosphorothioate linkage
  modified_base 3: mod_base = um
  modified_base 3^4: mod_base = OTHER; note = phosphorothioate linkage
  modified_base 4: mod_base = OTHER; note = 2'-fluorocytidine
  modified_base 5: mod_base = OTHER; note = 2'-O-methyladenosine
  modified_base 6: mod_base = OTHER; note = 2'-fluoroguanosine
  modified_base 7: mod_base = OTHER; note = 2'-O-methyladenosine
  modified_base 8: mod_base = gm
  modified_base 9: mod_base = gm
  modified_base 10: mod_base = um
  modified_base 11: mod_base = gm
  modified_base 12: mod_base = OTHER; note = 2'-fluoroadenosine
  modified_base 13: mod_base = cm
  modified_base 14: mod_base = OTHER; note = 2'-fluoroadenosine
  modified_base 15: mod_base = OTHER; note = 2'-O-methyladenosine
  modified_base 16: mod_base = OTHER; note = 2'-fluoroguanosine
  modified_base 17: mod_base = OTHER; note = 2'-O-methyladenosine
  modified_base 18: mod_base = OTHER; note = 2'-fluorouridine
  modified_base 19: mod_base = um
  modified_base 20: mod_base = gm
  modified_base 20^21: mod_base = OTHER; note = phosphorothioate linkage
  modified_base 21: mod_base = gm
  source 1..21: mol_type = other RNA
agtcagaggtgacaagattgg

SEQ ID NO: 1159 - RNA, 21 nt, synthetic construct
  modified_base 1: mod_base = um
  modified_base 1^2: mod_base = OTHER; note = phosphorothioate linkage
  modified_base 2: mod_base = OTHER; note = 2'-fluorouridine
  modified_base 2^3: mod_base = OTHER; note = phosphorothioate linkage
  modified_base 3: mod_base = OTHER; note = 2'-O-methyladenosine
  modified_base 3^4: mod_base = OTHER; note = phosphorothioate linkage
  modified_base 4: mod_base = OTHER; note = 2'-fluoroguanosine
  modified_base 5: mod_base = um
  modified_base 6: mod_base = OTHER; note = 2'-fluorocytidine
  modified_base 7: mod_base = OTHER; note = 2'-O-methyladenosine
  modified_base 8: mod_base = gm
  modified_base 9: mod_base = OTHER; note = 2'-O-methyladenosine
  modified_base 10: mod_base = gm
  modified_base 11: mod_base = gm
  modified_base 12: mod_base = OTHER; note = 2'-fluorouridine
  modified_base 13: mod_base = gm
  modified_base 14: mod_base = OTHER; note = 2'-fluoroadenosine
  modified_base 15: mod_base = cm
  modified_base 16: mod_base = OTHER; note = 2'-fluoroadenosine
  modified_base 17: mod_base = OTHER; note = 2'-O-methyladenosine
  modified_base 18: mod_base = OTHER; note = 2'-fluoroguanosine
  modified_base 19: mod_base = OTHER; note = 2'-O-methyladenosine
  modified_base 20: mod_base = um
  modified_base 20^21: mod_base = OTHER; note = phosphorothioate linkage
  modified_base 21: mod_base = cm
  source 1..21: mol_type = other RNA
ttagtcagaggtgacaagatc

SEQ ID NO: 1160 - RNA, 21 nt, synthetic construct
  modified_base 1: mod_base = um
  modified_base 1^2: mod_base = OTHER; note = phosphorothioate linkage
  modified_base 2: mod_base = OTHER; note = 2'-fluorocytidine
  modified_base 2^3: mod_base = OTHER; note = phosphorothioate linkage
  modified_base 3: mod_base = um
  modified_base 3^4: mod_base = OTHER; note = phosphorothioate linkage
  modified_base 4: mod_base = OTHER; note = 2'-fluorocytidine
  modified_base 5: mod_base = um
  modified_base 6: mod_base = OTHER; note = 2'-fluoroadenosine
  modified_base 7: mod_base = um
  modified_base 8: mod_base = cm
  modified_base 9: mod_base = cm
  modified_base 10: mod_base = OTHER; note = 2'-O-methyladenosine
  modified_base 11: mod_base = um
  modified_base 12: mod_base = OTHER; note = 2'-fluoroguanosine
  modified_base 13: mod_base = um
  modified_base 14: mod_base = OTHER; note = 2'-fluorouridine
  modified_base 15: mod_base = gm
  modified_base 16: mod_base = OTHER; note = 2'-fluorouridine
  modified_base 17: mod_base = um
  modified_base 18: mod_base = OTHER; note = 2'-fluorocytidine
  modified_base 19: mod_base = gm
  modified_base 20: mod_base = gm
  modified_base 20^21: mod_base = OTHER; note = phosphorothioate linkage
  modified_base 21: mod_base = gm
  source 1..21: mol_type = other RNA
tctctatccatgttgttcggg

SEQ ID NO: 1161 - RNA, 21 nt, synthetic construct
  modified_base 1: mod_base = OTHER; note = 2'-O-methyladenosine
  modified_base 1^2: mod_base = OTHER; note = phosphorothioate linkage
  modified_base 2: mod_base = OTHER; note = 2'-fluoroadenosine
  modified_base 2^3: mod_base = OTHER; note = phosphorothioate linkage
  modified_base 3: mod_base = cm
  modified_base 3^4: mod_base = OTHER; note = phosphorothioate linkage
  modified_base 4: mod_base = OTHER; note = 2'-fluorouridine
  modified_base 5: mod_base = gm
  modified_base 6: mod_base = OTHER; note = 2'-fluorocytidine
  modified_base 7: mod_base = um
  modified_base 8: mod_base = cm
  modified_base 9: mod_base = um
  modified_base 10: mod_base = OTHER; note = 2'-O-methyladenosine
  modified_base 11: mod_base = um
  modified_base 12: mod_base = OTHER; note = 2'-fluorocytidine
  modified_base 13: mod_base = cm
  modified_base 14: mod_base = OTHER; note = 2'-fluoroadenosine
  modified_base 15: mod_base = um
  modified_base 16: mod_base = OTHER; note = 2'-fluoroguanosine
  modified_base 17: mod_base = um
  modified_base 18: mod_base = OTHER; note = 2'-fluorouridine
  modified_base 19: mod_base = gm
  modified_base 20: mod_base = um
  modified_base 20^21: mod_base = OTHER; note = phosphorothioate linkage
  modified_base 21: mod_base = cm
  source 1..21: mol_type = other RNA
aactgctctatccatgttgtc

SEQ ID NO: 1162 - RNA, 21 nt, synthetic construct
  modified_base 1: mod_base = um
  modified_base 1^2: mod_base = OTHER; note = phosphorothioate linkage
  modified_base 2: mod_base = OTHER; note = 2'-fluoroadenosine
  modified_base 2^3: mod_base = OTHER; note = phosphorothioate linkage
  modified_base 3: mod_base = gm
  modified_base 3^4: mod_base = OTHER; note = phosphorothioate linkage
  modified_base 4: mod_base = OTHER; note = 2'-fluorouridine
  modified_base 5: mod_base = um
  modified_base 6: mod_base = OTHER; note = 2'-fluoroguanosine
  modified_base 7: mod_base = OTHER; note = 2'-O-methyladenosine
  modified_base 8: mod_base = OTHER; note = 2'-O-methyladenosine
  modified_base 9: mod_base = um
  modified_base 10: mod_base = OTHER; note = 2'-O-methyladenosine
  modified_base 11: mod_base = gm
  modified_base 12: mod_base = OTHER; note = 2'-fluorocytidine
  modified_base 13: mod_base = um
  modified_base 14: mod_base = OTHER; note = 2'-fluorouridine
  modified_base 15: mod_base = OTHER; note = 2'-O-methyladenosine
  modified_base 16: mod_base = OTHER; note = 2'-fluoroguanosine
  modified_base 17: mod_base = um
  modified_base 18: mod_base = OTHER; note = 2'-fluoroguanosine
  modified_base 19: mod_base = OTHER; note = 2'-O-methyladenosine
  modified_base 20: mod_base = cm
  modified_base 20^21: mod_base = OTHER; note = phosphorothioate linkage
  modified_base 21: mod_base = OTHER; note = 2'-O-methyladenosine
  source 1..21: mol_type = other RNA
tagttgaatagcttagtgaca

SEQ ID NO: 1163 - RNA, 21 nt, synthetic construct
  modified_base 1: mod_base = um
  modified_base 1^2: mod_base = OTHER; note = phosphorothioate linkage
  modified_base 2: mod_base = OTHER; note = 2'-fluorouridine
  modified_base 2^3: mod_base = OTHER; note = phosphorothioate linkage
  modified_base 3: mod_base = gm
  modified_base 3^4: mod_base = OTHER; note = phosphorothioate linkage
  modified_base 4: mod_base = OTHER; note = 2'-fluoroguanosine
  modified_base 5: mod_base = cm
  modified_base 6: mod_base = OTHER; note = 2'-fluoroadenosine
  modified_base 7: mod_base = OTHER; note = 2'-O-methyladenosine
  modified_base 8: mod_base = gm
  modified_base 9: mod_base = um
  modified_base 10: mod_base = gm
  modified_base 11: mod_base = cm
  modified_base 12: mod_base = OTHER; note = 2'-fluoroadenosine
  modified_base 13: mod_base = cm
  modified_base 14: mod_base = OTHER; note = 2'-fluorocytidine
  modified_base 15: mod_base = OTHER; note = 2'-O-methyladenosine
  modified_base 16: mod_base = OTHER; note = 2'-fluoroguanosine
  modified_base 17: mod_base = um
  modified_base 18: mod_base = OTHER; note = 2'-fluorouridine
  modified_base 19: mod_base = gm
  modified_base 20: mod_base = OTHER; note = 2'-O-methyladenosine
  modified_base 20^21: mod_base = OTHER; note = phosphorothioate linkage
  modified_base 21: mod_base = cm
  source 1..21: mol_type = other RNA
ttggcaagtgcaccagttgac

SEQ ID NO: 1164 - RNA, 21 nt, synthetic construct
  modified_base 1: mod_base = OTHER; note = 2'-O-methyladenosine
  modified_base 1^2: mod_base = OTHER; note = phosphorothioate linkage
  modified_base 2: mod_base = OTHER; note = 2'-fluoroadenosine
  modified_base 2^3: mod_base = OTHER; note = phosphorothioate linkage
  modified_base 3: mod_base = OTHER; note = 2'-O-methyladenosine
  modified_base 3^4: mod_base = OTHER; note = phosphorothioate linkage
  modified_base 4: mod_base = OTHER; note = 2'-fluoroguanosine
  modified_base 5: mod_base = cm
  modified_base 6: mod_base = OTHER; note = 2'-fluoroadenosine
  modified_base 7: mod_base = gm
  modified_base 8: mod_base = cm
  modified_base 9: mod_base = um
  modified_base 10: mod_base = um
  modified_base 11: mod_base = cm
  modified_base 12: mod_base = OTHER; note = 2'-fluorouridine
  modified_base 13: mod_base = gm
  modified_base 14: mod_base = OTHER; note = 2'-fluorouridine
  modified_base 15: mod_base = gm
  modified_base 16: mod_base = OTHER; note = 2'-fluoroguanosine
  modified_base 17: mod_base = um
  modified_base 18: mod_base = OTHER; note = 2'-fluorocytidine
  modified_base 19: mod_base = OTHER; note = 2'-O-methyladenosine
  modified_base 20: mod_base = cm
  modified_base 20^21: mod_base = OTHER; note = phosphorothioate linkage
  modified_base 21: mod_base = um
  source 1..21: mol_type = other RNA
aaagcagcttctgtggtcact

SEQ ID NO: 1165 - RNA, 21 nt, synthetic construct
  modified_base 1: mod_base = um
  modified_base 1^2: mod_base = OTHER; note = phosphorothioate linkage
  modified_base 2: mod_base = OTHER; note = 2'-fluorocytidine
  modified_base 2^3: mod_base = OTHER; note = phosphorothioate linkage
  modified_base 3: mod_base = cm
  modified_base 3^4: mod_base = OTHER; note = phosphorothioate linkage
  modified_base 4: mod_base = OTHER; note = 2'-fluorouridine
  modified_base 5: mod_base = gm
  modified_base 6: mod_base = OTHER; note = 2'-fluoroadenosine
  modified_base 7: mod_base = um
  modified_base 8: mod_base = um
  modified_base 9: mod_base = OTHER; note = 2'-O-methyladenosine
  modified_base 10: mod_base = gm
  modified_base 11: mod_base = um
  modified_base 12: mod_base = OTHER; note = 2'-fluoroguanosine
  modified_base 13: mod_base = gm
  modified_base 14: mod_base = OTHER; note = 2'-fluoroadenosine
  modified_base 15: mod_base = um
  modified_base 16: mod_base = OTHER; note = 2'-fluorouridine
  modified_base 17: mod_base = gm
  modified_base 18: mod_base = OTHER; note = 2'-fluoroguanosine
  modified_base 19: mod_base = um
  modified_base 20: mod_base = gm
  modified_base 20^21: mod_base = OTHER; note = phosphorothioate linkage
  modified_base 21: mod_base = gm
  source 1..21: mol_type = other RNA
tcctgattagtggattggtgg

SEQ ID NO: 1166 - RNA, 21 nt, synthetic construct
  modified_base 1: mod_base = um
  modified_base 1^2: mod_base = OTHER; note = phosphorothioate linkage
  modified_base 2: mod_base = OTHER; note = 2'-fluorouridine
  modified_base 2^3: mod_base = OTHER; note = phosphorothioate linkage
  modified_base 3: mod_base = OTHER; note = 2'-O-methyladenosine
  modified_base 3^4: mod_base = OTHER; note = phosphorothioate linkage
  modified_base 4: mod_base = OTHER; note = 2'-fluoroguanosine
  modified_base 5: mod_base = gm
  modified_base 6: mod_base = OTHER; note = 2'-fluoroadenosine
  modified_base 7: mod_base = um
  modified_base 8: mod_base = gm
  modified_base 9: mod_base = OTHER; note = 2'-O-methyladenosine
  modified_base 10: mod_base = gm
  modified_base 11: mod_base = um
  modified_base 12: mod_base = OTHER; note = 2'-fluorocytidine
  modified_base 13: mod_base = cm
  modified_base 14: mod_base = OTHER; note = 2'-fluorocytidine
  modified_base 15: mod_base = OTHER; note = 2'-O-methyladenosine
  modified_base 16: mod_base = OTHER; note = 2'-fluoroadenosine
  modified_base 17: mod_base = um
  modified_base 18: mod_base = OTHER; note = 2'-fluoroadenosine
  modified_base 19: mod_base = gm
  modified_base 20: mod_base = um
  modified_base 20^21: mod_base = OTHER; note = phosphorothioate linkage
  modified_base 21: mod_base = cm
  source 1..21: mol_type = other RNA
ttaggatgagtcccaatagtc

SEQ ID NO: 1167 - RNA, 21 nt, synthetic construct
  modified_base 1: mod_base = um
  modified_base 1^2: mod_base = OTHER; note = phosphorothioate linkage
  modified_base 2: mod_base = OTHER; note = 2'-fluoroadenosine
  modified_base 2^3: mod_base = OTHER; note = phosphorothioate linkage
  modified_base 3: mod_base = cm
  modified_base 3^4: mod_base = OTHER; note = phosphorothioate linkage
  modified_base 4: mod_base = OTHER; note = 2'-fluoroadenosine
  modified_base 5: mod_base = OTHER; note = 2'-O-methyladenosine
  modified_base 6: mod_base = OTHER; note = 2'-fluoroadenosine
  modified_base 7: mod_base = OTHER; note = 2'-O-methyladenosine
  modified_base 8: mod_base = um
  modified_base 9: mod_base = gm
  modified_base 10: mod_base = OTHER; note = 2'-O-methyladenosine
  modified_base 11: mod_base = cm
  modified_base 12: mod_base = OTHER; note = 2'-fluorocytidine
  modified_base 13: mod_base = OTHER; note = 2'-O-methyladenosine
  modified_base 14: mod_base = OTHER; note = 2'-fluorouridine
  modified_base 15: mod_base = cm
  modified_base 16: mod_base = OTHER; note = 2'-fluoroguanosine
  modified_base 17: mod_base = um
  modified_base 18: mod_base = OTHER; note = 2'-fluorocytidine
  modified_base 19: mod_base = OTHER; note = 2'-O-methyladenosine
  modified_base 20: mod_base = OTHER; note = 2'-O-methyladenosine
  modified_base 20^21: mod_base = OTHER; note = phosphorothioate linkage
  modified_base 21: mod_base = cm
  source 1..21: mol_type = other RNA
tacaaaatgaccatcgtcaac

SEQ ID NO: 1168 - RNA, 21 nt, synthetic construct
  modified_base 1: mod_base = um
  modified_base 1^2: mod_base = OTHER; note = phosphorothioate linkage
  modified_base 2: mod_base = OTHER; note = 2'-fluoroguanosine
  modified_base 2^3: mod_base = OTHER; note = phosphorothioate linkage
  modified_base 3: mod_base = OTHER; note = 2'-O-methyladenosine
  modified_base 3^4: mod_base = OTHER; note = phosphorothioate linkage
  modified_base 4: mod_base = OTHER; note = 2'-fluorocytidine
  modified_base 5: mod_base = OTHER; note = 2'-O-methyladenosine
  modified_base 6: mod_base = OTHER; note = 2'-fluoroadenosine
  modified_base 7: mod_base = OTHER; note = 2'-O-methyladenosine
  modified_base 8: mod_base = OTHER; note = 2'-O-methyladenosine
  modified_base 9: mod_base = um
  modified_base 10: mod_base = gm
  modified_base 11: mod_base = OTHER; note = 2'-O-methyladenosine
  modified_base 12: mod_base = OTHER; note = 2'-fluorocytidine
  modified_base 13: mod_base = cm
  modified_base 14: mod_base = OTHER; note = 2'-fluoroadenosine
  modified_base 15: mod_base = um
  modified_base 16: mod_base = OTHER; note = 2'-fluorocytidine
  modified_base 17: mod_base = gm
  modified_base 18: mod_base = OTHER; note = 2'-fluorouridine
  modified_base 19: mod_base = cm
  modified_base 20: mod_base = OTHER; note = 2'-O-methyladenosine
  modified_base 20^21: mod_base = OTHER; note = phosphorothioate linkage
  modified_base 21: mod_base = cm
  source 1..21: mol_type = other RNA
tgacaaaatgaccatcgtcac

SEQ ID NO: 1169 - RNA, 21 nt, synthetic construct
  modified_base 1: mod_base = OTHER; note = 5'-cyclopropyl phosphonate-2'-O-methyluridine
  modified_base 1^2: mod_base = OTHER; note = phosphorothioate linkage
  modified_base 2: mod_base = OTHER; note = 2'-fluorouridine
  modified_base 2^3: mod_base = OTHER; note = phosphorothioate linkage
  modified_base 3: mod_base = OTHER; note = 2'-O-methyladenosine
  modified_base 3^4: mod_base = OTHER; note = phosphorothioate linkage
  modified_base 4: mod_base = OTHER; note = 2'-fluorocytidine
  modified_base 5: mod_base = gm
  modified_base 6: mod_base = OTHER; note = 2'-fluorouridine
  modified_base 7: mod_base = um
  modified_base 8: mod_base = um
  modified_base 9: mod_base = cm
  modified_base 10: mod_base = gm
  modified_base 11: mod_base = OTHER; note = 2'-O-methyladenosine
  modified_base 12: mod_base = OTHER; note = 2'-fluorocytidine
  modified_base 13: mod_base = cm
  modified_base 14: mod_base = OTHER; note = 2'-fluorouridine
  modified_base 15: mod_base = cm
  modified_base 16: mod_base = OTHER; note = 2'-fluoroguanosine
  modified_base 17: mod_base = gm
  modified_base 18: mod_base = OTHER; note = 2'-fluorouridine
  modified_base 19: mod_base = um
  modified_base 20: mod_base = OTHER; note = 2'-O-methyladenosine
  modified_base 20^21: mod_base = OTHER; note = phosphorothioate linkage
  modified_base 21: mod_base = gm
  source 1..21: mol_type = other RNA
ttacgtttcgacctcggttag

SEQ ID NO: 1170 - RNA, 21 nt, synthetic construct
  modified_base 1: mod_base = OTHER; note = 5'-cyclopropyl phosphonate-2'-O-methyluridine
  modified_base 1^2: mod_base = OTHER; note = phosphorothioate linkage
  modified_base 2: mod_base = OTHER; note = 2'-fluoroadenosine
  modified_base 2^3: mod_base = OTHER; note = phosphorothioate linkage
  modified_base 3: mod_base = um
  modified_base 3^4: mod_base = OTHER; note = phosphorothioate linkage
  modified_base 4: mod_base = OTHER; note = 2'-fluoroguanosine
  modified_base 5: mod_base = OTHER; note = 2'-O-methyladenosine
  modified_base 6: mod_base = OTHER; note = 2'-fluorouridine
  modified_base 7: mod_base = OTHER; note = 2'-O-methyladenosine
  modified_base 8: mod_base = gm
  modified_base 9: mod_base = OTHER; note = 2'-O-methyladenosine
  modified_base 10: mod_base = OTHER; note = 2'-O-methyladenosine
  modified_base 11: mod_base = OTHER; note = 2'-O-methyladenosine
  modified_base 12: mod_base = OTHER; note = 2'-fluoroguanosine
  modified_base 13: mod_base = OTHER; note = 2'-O-methyladenosine
  modified_base 14: mod_base = OTHER; note = 2'-fluoroadenosine
  modified_base 15: mod_base = cm
  modified_base 16: mod_base = OTHER; note = 2'-fluoroguanosine
  modified_base 17: mod_base = um
  modified_base 18: mod_base = OTHER; note = 2'-fluoroadenosine
  modified_base 19: mod_base = cm
  modified_base 20: mod_base = gm
  modified_base 20^21: mod_base = OTHER; note = phosphorothioate linkage
  modified_base 21: mod_base = um
  source 1..21: mol_type = other RNA
tatgatagaaagaacgtacgt

SEQ ID NO: 1171 - RNA, 21 nt, synthetic construct
  modified_base 1: mod_base = OTHER; note = 5'-cyclopropyl phosphonate-2'-O-methyluridine
  modified_base 1^2: mod_base = OTHER; note = phosphorothioate linkage
  modified_base 2: mod_base = OTHER; note = 2'-fluoroadenosine
  modified_base 2^3: mod_base = OTHER; note = phosphorothioate linkage
  modified_base 3: mod_base = cm
  modified_base 3^4: mod_base = OTHER; note = phosphorothioate linkage
  modified_base 4: mod_base = OTHER; note = 2'-fluoroadenosine
  modified_base 5: mod_base = OTHER; note = 2'-O-methyladenosine
  modified_base 6: mod_base = OTHER; note = 2'-fluoroadenosine
  modified_base 7: mod_base = OTHER; note = 2'-O-methyladenosine
  modified_base 8: mod_base = um
  modified_base 9: mod_base = gm
  modified_base 10: mod_base = OTHER; note = 2'-O-methyladenosine
  modified_base 11: mod_base = cm
  modified_base 12: mod_base = OTHER; note = 2'-fluorocytidine
  modified_base 13: mod_base = OTHER; note = 2'-O-methyladenosine
  modified_base 14: mod_base = OTHER; note = 2'-fluorouridine
  modified_base 15: mod_base = cm
  modified_base 16: mod_base = OTHER; note = 2'-fluoroguanosine
  modified_base 17: mod_base = um
  modified_base 18: mod_base = OTHER; note = 2'-fluorocytidine
  modified_base 19: mod_base = OTHER; note = 2'-O-methyladenosine
  modified_base 20: mod_base = OTHER; note = 2'-O-methyladenosine
  modified_base 20^21: mod_base = OTHER; note = phosphorothioate linkage
  modified_base 21: mod_base = cm
  source 1..21: mol_type = other RNA
tacaaaatgaccatcgtcaac

SEQ ID NO: 1172 - RNA, 21 nt, synthetic construct
  modified_base 1: mod_base = OTHER; note = 5'-cyclopropyl phosphonate-2'-O-methyluridine
  modified_base 1^2: mod_base = OTHER; note = phosphorothioate linkage
  modified_base 2: mod_base = OTHER; note = 2'-fluoroguanosine
  modified_base 2^3: mod_base = OTHER; note = phosphorothioate linkage
  modified_base 3: mod_base = OTHER; note = 2'-O-methyladenosine
  modified_base 3^4: mod_base = OTHER; note = phosphorothioate linkage
  modified_base 4: mod_base = OTHER; note = 2'-fluorocytidine
  modified_base 5: mod_base = OTHER; note = 2'-O-methyladenosine
  modified_base 6: mod_base = OTHER; note = 2'-fluoroadenosine
  modified_base 7: mod_base = OTHER; note = 2'-O-methyladenosine
  modified_base 8: mod_base = OTHER; note = 2'-O-methyladenosine
  modified_base 9: mod_base = um
  modified_base 10: mod_base = gm
  modified_base 11: mod_base = OTHER; note = 2'-O-methyladenosine
  modified_base 12: mod_base = OTHER; note = 2'-fluorocytidine
  modified_base 13: mod_base = cm
  modified_base 14: mod_base = OTHER; note = 2'-fluoroadenosine
  modified_base 15: mod_base = um
  modified_base 16: mod_base = OTHER; note = 2'-fluorocytidine
  modified_base 17: mod_base = gm
  modified_base 18: mod_base = OTHER; note = 2'-fluorouridine
  modified_base 19: mod_base = cm
  modified_base 20: mod_base = OTHER; note = 2'-O-methyladenosine
  modified_base 20^21: mod_base = OTHER; note = phosphorothioate linkage
  modified_base 21: mod_base = cm
  source 1..21: mol_type = other RNA
tgacaaaatgaccatcgtcac

SEQ ID NO: 1173 - RNA, 21 nt, synthetic construct
  modified_base 1: mod_base = OTHER; note = 5'-cyclopropyl phosphonate-2'-O-methyluridine
  modified_base 1^2: mod_base = OTHER; note = phosphorothioate linkage
  modified_base 2: mod_base = OTHER; note = 2'-fluorouridine
  modified_base 2^3: mod_base = OTHER; note = phosphorothioate linkage
  modified_base 3: mod_base = OTHER; note = 2'-fluoroadenosine
  modified_base 3^4: mod_base = OTHER; note = phosphorothioate linkage
  modified_base 4: mod_base = cm
  modified_base 5: mod_base = gm
  modified_base 6: mod_base = um
  modified_base 7: mod_base = um
  modified_base 8: mod_base = um
  modified_base 9: mod_base = cm
  modified_base 10: mod_base = gm
  modified_base 11: mod_base = OTHER; note = 2'-O-methyladenosine
  modified_base 12: mod_base = OTHER; note = 2'-fluorocytidine
  modified_base 13: mod_base = cm
  modified_base 14: mod_base = OTHER; note = 2'-fluorouridine
  modified_base 15: mod_base = cm
  modified_base 16: mod_base = OTHER; note = 2'-fluoroguanosine
  modified_base 17: mod_base = gm
  modified_base 18: mod_base = um
  modified_base 19: mod_base = um
  modified_base 20: mod_base = OTHER; note = 2'-O-methyladenosine
  modified_base 20^21: mod_base = OTHER; note = phosphorothioate linkage
  modified_base 21: mod_base = gm
  source 1..21: mol_type = other RNA
ttacgtttcgacctcggttag

SEQ ID NO: 1174 - RNA, 21 nt, synthetic construct
  modified_base 1: mod_base = OTHER; note = 5'-cyclopropyl phosphonate-2'-O-methyluridine
  modified_base 1^2: mod_base = OTHER; note = phosphorothioate linkage
  modified_base 2: mod_base = OTHER; note = 2'-fluorouridine
  modified_base 2^3: mod_base = OTHER; note = phosphorothioate linkage
  modified_base 3: mod_base = OTHER; note = 2'-O-methyladenosine
  modified_base 3^4: mod_base = OTHER; note = phosphorothioate linkage
  modified_base 4: mod_base = OTHER; note = 2'-fluorocytidine
  modified_base 5: mod_base = gm
  modified_base 6: mod_base = um
  modified_base 7: mod_base = um
  modified_base 8: mod_base = um
  modified_base 9: mod_base = cm
  modified_base 10: mod_base = gm
  modified_base 11: mod_base = OTHER; note = 2'-O-methyladenosine
  modified_base 12: mod_base = OTHER; note = 2'-fluorocytidine
  modified_base 13: mod_base = cm
  modified_base 14: mod_base = OTHER; note = 2'-fluorouridine
  modified_base 15: mod_base = cm
  modified_base 16: mod_base = OTHER; note = 2'-fluoroguanosine
  modified_base 17: mod_base = gm
  modified_base 18: mod_base = um
  modified_base 19: mod_base = um
  modified_base 20: mod_base = OTHER; note = 2'-O-methyladenosine
  modified_base 20^21: mod_base = OTHER; note = phosphorothioate linkage
  modified_base 21: mod_base = gm
  source 1..21: mol_type = other RNA
ttacgtttcgacctcggttag

SEQ ID NO: 1175 - RNA, 21 nt, synthetic construct
  modified_base 1: mod_base = OTHER; note = 5'-cyclopropyl phosphonate-2'-O-methyluridine
  modified_base 1^2: mod_base = OTHER; note = phosphorothioate linkage
  modified_base 2: mod_base = OTHER; note = 2'-fluorouridine
  modified_base 2^3: mod_base = OTHER; note = phosphorothioate linkage
  modified_base 3: mod_base = OTHER; note = 2'-O-methyladenosine
  modified_base 3^4: mod_base = OTHER; note = phosphorothioate linkage
  modified_base 4: mod_base = cm
  modified_base 5: mod_base = OTHER; note = 2'-fluoroguanosine
  modified_base 6: mod_base = um
  modified_base 7: mod_base = um
  modified_base 8: mod_base = um
  modified_base 9: mod_base = cm
  modified_base 10: mod_base = gm
  modified_base 11: mod_base = OTHER; note = 2'-O-methyladenosine
  modified_base 12: mod_base = OTHER; note = 2'-fluorocytidine
  modified_base 13: mod_base = cm
  modified_base 14: mod_base = OTHER; note = 2'-fluorouridine
  modified_base 15: mod_base = cm
  modified_base 16: mod_base = OTHER; note = 2'-fluoroguanosine
  modified_base 17: mod_base = gm
  modified_base 18: mod_base = um
  modified_base 19: mod_base = um
  modified_base 20: mod_base = OTHER; note = 2'-O-methyladenosine
  modified_base 20^21: mod_base = OTHER; note = phosphorothioate linkage
  modified_base 21: mod_base = gm
  source 1..21: mol_type = other RNA
ttacgtttcgacctcggttag

SEQ ID NO: 1176 - RNA, 21 nt, synthetic construct
  modified_base 1: mod_base = OTHER; note = 5'-cyclopropyl phosphonate-2'-O-methyluridine
  modified_base 1^2: mod_base = OTHER; note = phosphorothioate linkage
  modified_base 2: mod_base = OTHER; note = 2'-fluorouridine
  modified_base 2^3: mod_base = OTHER; note = phosphorothioate linkage
  modified_base 3: mod_base = OTHER; note = 2'-O-methyladenosine
  modified_base 3^4: mod_base = OTHER; note = phosphorothioate linkage
  modified_base 4: mod_base = cm
  modified_base 5: mod_base = gm
  modified_base 6: mod_base = um
  modified_base 7: mod_base = OTHER; note = 2'-fluorouridine
  modified_base 8: mod_base = um
  modified_base 9: mod_base = cm
  modified_base 10: mod_base = gm
  modified_base 11: mod_base = OTHER; note = 2'-O-methyladenosine
  modified_base 12: mod_base = OTHER; note = 2'-fluorocytidine
  modified_base 13: mod_base = cm
  modified_base 14: mod_base = OTHER; note = 2'-fluorouridine
  modified_base 15: mod_base = cm
  modified_base 16: mod_base = OTHER; note = 2'-fluoroguanosine
  modified_base 17: mod_base = gm
  modified_base 18: mod_base = um
  modified_base 19: mod_base = um
  modified_base 20: mod_base = OTHER; note = 2'-O-methyladenosine
  modified_base 20^21: mod_base = OTHER; note = phosphorothioate linkage
  modified_base 21: mod_base = gm
  source 1..21: mol_type = other RNA
ttacgtttcgacctcggttag

SEQ ID NO: 1177 - RNA, 21 nt, synthetic construct
  modified_base 1: mod_base = OTHER; note = 5'-cyclopropyl phosphonate-2'-O-methyluridine
  modified_base 1^2: mod_base = OTHER; note = phosphorothioate linkage
  modified_base 2: mod_base = OTHER; note = 2'-fluorouridine
  modified_base 2^3: mod_base = OTHER; note = phosphorothioate linkage
  modified_base 3: mod_base = OTHER; note = 2'-O-methyladenosine
  modified_base 3^4: mod_base = OTHER; note = phosphorothioate linkage
  modified_base 4: mod_base = cm
  modified_base 5: mod_base = gm
  modified_base 6: mod_base = um
  modified_base 7: mod_base = um
  modified_base 8: mod_base = um
  modified_base 9: mod_base = OTHER; note = 2'-fluorocytidine
  modified_base 10: mod_base = gm
  modified_base 11: mod_base = OTHER; note = 2'-O-methyladenosine
  modified_base 12: mod_base = OTHER; note = 2'-fluorocytidine
  modified_base 13: mod_base = cm
  modified_base 14: mod_base = OTHER; note = 2'-fluorouridine
  modified_base 15: mod_base = cm
  modified_base 16: mod_base = OTHER; note = 2'-fluoroguanosine
  modified_base 17: mod_base = gm
  modified_base 18: mod_base = um
  modified_base 19: mod_base = um
  modified_base 20: mod_base = OTHER; note = 2'-O-methyladenosine
  modified_base 20^21: mod_base = OTHER; note = phosphorothioate linkage
  modified_base 21: mod_base = gm
  source 1..21: mol_type = other RNA
ttacgtttcgacctcggttag

SEQ ID NO: 1178 - RNA, 21 nt, synthetic construct
  modified_base 1: mod_base = OTHER; note = 5'-cyclopropyl phosphonate-2'-O-methyluridine
  modified_base 1^2: mod_base = OTHER; note = phosphorothioate linkage
  modified_base 2: mod_base = OTHER; note = 2'-fluorouridine
  modified_base 2^3: mod_base = OTHER; note = phosphorothioate linkage
  modified_base 3: mod_base = OTHER; note = 2'-O-methyladenosine
  modified_base 4: mod_base = OTHER; note = 2'-fluorocytidine
  modified_base 5: mod_base = gm
  modified_base 6: mod_base = OTHER; note = 2'-fluorouridine
  modified_base 7: mod_base = um
  modified_base 8: mod_base = um
  modified_base 9: mod_base = cm
  modified_base 10: mod_base = gm
  modified_base 11: mod_base = OTHER; note = 2'-O-methyladenosine
  modified_base 12: mod_base = OTHER; note = 2'-fluorocytidine
  modified_base 13: mod_base = cm
  modified_base 14: mod_base = OTHER; note = 2'-fluorouridine
  modified_base 15: mod_base = cm
  modified_base 16: mod_base = OTHER; note = 2'-fluoroguanosine
  modified_base 17: mod_base = gm
  modified_base 18: mod_base = OTHER; note = 2'-fluorouridine
  modified_base 19: mod_base = um
  modified_base 20: mod_base = OTHER; note = 2'-O-methyladenosine
  modified_base 20^21: mod_base = OTHER; note = phosphorothioate linkage
  modified_base 21: mod_base = gm
  source 1..21: mol_type = other RNA
ttacgtttcgacctcggttag

SEQ ID NO: 1179 - RNA, 21 nt, synthetic construct
  modified_base 1: mod_base = OTHER; note = 5'-cyclopropyl phosphonate-2'-O-methyluridine
  modified_base 1^2: mod_base = OTHER; note = phosphorothioate linkage
  modified_base 2: mod_base = OTHER; note = 2'-fluorocytidine
  modified_base 2^3: mod_base = OTHER; note = phosphorothioate linkage
  modified_base 3: mod_base = um
  modified_base 3^4: mod_base = OTHER; note = phosphorothioate linkage
  modified_base 4: mod_base = OTHER; note = 2'-fluorocytidine
  modified_base 5: mod_base = um
  modified_base 6: mod_base = OTHER; note = 2'-fluoroadenosine
  modified_base 7: mod_base = um
  modified_base 8: mod_base = cm
  modified_base 9: mod_base = cm
  modified_base 10: mod_base = OTHER; note = 2'-O-methyladenosine
  modified_base 11: mod_base = um
  modified_base 12: mod_base = OTHER; note = 2'-fluoroguanosine
  modified_base 13: mod_base = um
  modified_base 14: mod_base = OTHER; note = 2'-fluorouridine
  modified_base 15: mod_base = gm
  modified_base 16: mod_base = OTHER; note = 2'-fluorouridine
  modified_base 17: mod_base = um
  modified_base 18: mod_base = OTHER; note = 2'-fluorocytidine
  modified_base 19: mod_base = gm
  modified_base 20: mod_base = gm
  modified_base 20^21: mod_base = OTHER; note = phosphorothioate linkage
  modified_base 21: mod_base = gm
  source 1..21: mol_type = other RNA
tctctatccatgttgttcggg

SEQ ID NO: 1180 - RNA, 21 nt, synthetic construct
  modified_base 1: mod_base = OTHER; note = 5'-cyclopropyl phosphonate-2'-O-methyladenosine
  modified_base 1^2: mod_base = OTHER; note = phosphorothioate linkage
  modified_base 2: mod_base = OTHER; note = 2'-fluoroadenosine
  modified_base 2^3: mod_base = OTHER; note = phosphorothioate linkage
  modified_base 3: mod_base = cm
  modified_base 3^4: mod_base = OTHER; note = phosphorothioate linkage
  modified_base 4: mod_base = OTHER; note = 2'-fluorouridine
  modified_base 5: mod_base = gm
  modified_base 6: mod_base = OTHER; note = 2'-fluorocytidine
  modified_base 7: mod_base = um
  modified_base 8: mod_base = cm
  modified_base 9: mod_base = um
  modified_base 10: mod_base = OTHER; note = 2'-O-methyladenosine
  modified_base 11: mod_base = um
  modified_base 12: mod_base = OTHER; note = 2'-fluorocytidine
  modified_base 13: mod_base = cm
  modified_base 14: mod_base = OTHER; note = 2'-fluoroadenosine
  modified_base 15: mod_base = um
  modified_base 16: mod_base = OTHER; note = 2'-fluoroguanosine
  modified_base 17: mod_base = um
  modified_base 18: mod_base = OTHER; note = 2'-fluorouridine
  modified_base 19: mod_base = gm
  modified_base 20: mod_base = um
  modified_base 20^21: mod_base = OTHER; note = phosphorothioate linkage
  modified_base 21: mod_base = cm
  source 1..21: mol_type = other RNA
aactgctctatccatgttgtc

SEQ ID NO: 1181 - RNA, 21 nt, synthetic construct
  modified_base 1: mod_base = OTHER; note = 5'-cyclopropyl phosphonate-2'-O-methyluridine
  modified_base 1^2: mod_base = OTHER; note = phosphorothioate linkage
  modified_base 2: mod_base = OTHER; note = 2'-fluoroadenosine
  modified_base 2^3: mod_base = OTHER; note = phosphorothioate linkage
  modified_base 3: mod_base = um
  modified_base 4: mod_base = OTHER; note = 2'-fluoroguanosine
  modified_base 5: mod_base = OTHER; note = 2'-O-methyladenosine
  modified_base 6: mod_base = OTHER; note = 2'-fluorouridine
  modified_base 7: mod_base = OTHER; note = 2'-O-methyladenosine
  modified_base 8: mod_base = gm
  modified_base 9: mod_base = OTHER; note = 2'-O-methyladenosine
  modified_base 10: mod_base = OTHER; note = 2'-O-methyladenosine
  modified_base 11: mod_base = OTHER; note = 2'-O-methyladenosine
  modified_base 12: mod_base = OTHER; note = 2'-fluoroguanosine
  modified_base 13: mod_base = OTHER; note = 2'-O-methyladenosine
  modified_base 14: mod_base = OTHER; note = 2'-fluoroadenosine
  modified_base 15: mod_base = cm
  modified_base 16: mod_base = OTHER; note = 2'-fluoroguanosine
  modified_base 17: mod_base = um
  modified_base 18: mod_base = OTHER; note = 2'-fluoroadenosine
  modified_base 19: mod_base = cm
  modified_base 19^20: mod_base = OTHER; note = phosphorothioate linkage
  modified_base 20: mod_base = gm
  modified_base 20^21: mod_base = OTHER; note = phosphorothioate linkage
  modified_base 21: mod_base = um
  source 1..21: mol_type = other RNA
tatgatagaaagaacgtacgt

SEQ ID NO: 1182 - RNA, 21 nt, synthetic construct
  modified_base 1: mod_base = OTHER; note = 5'-cyclopropyl phosphonate-2'-O-methyluridine
  modified_base 1^2: mod_base = OTHER; note = phosphorothioate linkage
  modified_base 2: mod_base = OTHER; note = 2'-fluoroadenosine
  modified_base 2^3: mod_base = OTHER; note = phosphorothioate linkage
  modified_base 3: mod_base = um
  modified_base 4: mod_base = OTHER; note = 2'-fluoroguanosine
  modified_base 5: mod_base = OTHER; note = 2'-O-methyladenosine
  modified_base 6: mod_base = OTHER; note = 2'-fluorouridine
  modified_base 7: mod_base = OTHER; note = 2'-O-methyladenosine
  modified_base 8: mod_base = gm
  modified_base 9: mod_base = OTHER; note = 2'-O-methyladenosine
  modified_base 10: mod_base = OTHER; note = 2'-O-methyladenosine
  modified_base 11: mod_base = OTHER; note = 2'-O-methyladenosine
  modified_base 12: mod_base = OTHER; note = 2'-fluoroguanosine
  modified_base 13: mod_base = OTHER; note = 2'-O-methyladenosine
  modified_base 14: mod_base = OTHER; note = 2'-fluoroadenosine
  modified_base 15: mod_base = cm
  modified_base 16: mod_base = OTHER; note = 2'-fluoroguanosine
  modified_base 17: mod_base = um
  modified_base 18: mod_base = OTHER; note = 2'-fluoroadenosine
  modified_base 19: mod_base = cm
  modified_base 20: mod_base = gm
  modified_base 20^21: mod_base = OTHER; note = phosphorothioate linkage
  modified_base 21: mod_base = um
  source 1..21: mol_type = other RNA
tatgatagaaagaacgtacgt

SEQ ID NO: 1183 - RNA, 21 nt, synthetic construct
  modified_base 1: mod_base = OTHER; note = 5'-cyclopropyl phosphonate-2'-O-methyluridine
  modified_base 1^2: mod_base = OTHER; note = phosphorothioate linkage
  modified_base 2: mod_base = OTHER; note = 2'-fluoroadenosine
  modified_base 2^3: mod_base = OTHER; note = phosphorothioate linkage
  modified_base 3: mod_base = OTHER; note = 2'-fluorouridine
  modified_base 3^4: mod_base = OTHER; note = phosphorothioate linkage
  modified_base 4: mod_base = gm
  modified_base 5: mod_base = OTHER; note = 2'-O-methyladenosine
  modified_base 6: mod_base = um
  modified_base 7: mod_base = OTHER; note = 2'-O-methyladenosine
  modified_base 8: mod_base = gm
  modified_base 9: mod_base = OTHER; note = 2'-O-methyladenosine
  modified_base 10: mod_base = OTHER; note = 2'-O-methyladenosine
  modified_base 11: mod_base = OTHER; note = 2'-O-methyladenosine
  modified_base 12: mod_base = OTHER; note = 2'-fluoroguanosine
  modified_base 13: mod_base = OTHER; note = 2'-O-methyladenosine
  modified_base 14: mod_base = OTHER; note = 2'-fluoroadenosine
  modified_base 15: mod_base = cm
  modified_base 16: mod_base = OTHER; note = 2'-fluoroguanosine
  modified_base 17: mod_base = um
  modified_base 18: mod_base = OTHER; note = 2'-O-methyladenosine
  modified_base 19: mod_base = cm
  modified_base 20: mod_base = gm
  modified_base 20^21: mod_base = OTHER; note = phosphorothioate linkage
  modified_base 21: mod_base = um
  source 1..21: mol_type = other RNA
tatgatagaaagaacgtacgt

SEQ ID NO: 1184 - RNA, 21 nt, synthetic construct
  modified_base 1: mod_base = OTHER; note = 5'-cyclopropyl phosphonate-2'-O-methyluridine
  modified_base 1^2: mod_base = OTHER; note = phosphorothioate linkage
  modified_base 2: mod_base = OTHER; note = 2'-fluoroadenosine
  modified_base 2^3: mod_base = OTHER; note = phosphorothioate linkage
  modified_base 3: mod_base = um
  modified_base 3^4: mod_base = OTHER; note = phosphorothioate linkage
  modified_base 4: mod_base = gm
  modified_base 5: mod_base = OTHER; note = 2'-fluoroadenosine
  modified_base 6: mod_base = um
  modified_base 7: mod_base = OTHER; note = 2'-O-methyladenosine
  modified_base 8: mod_base = gm
  modified_base 9: mod_base = OTHER; note = 2'-O-methyladenosine
  modified_base 10: mod_base = OTHER; note = 2'-O-methyladenosine
  modified_base 11: mod_base = OTHER; note = 2'-O-methyladenosine
  modified_base 12: mod_base = OTHER; note = 2'-fluoroguanosine
  modified_base 13: mod_base = OTHER; note = 2'-O-methyladenosine
  modified_base 14: mod_base = OTHER; note = 2'-fluoroadenosine
  modified_base 15: mod_base = cm
  modified_base 16: mod_base = OTHER; note = 2'-fluoroguanosine
  modified_base 17: mod_base = um
  modified_base 18: mod_base = OTHER; note = 2'-O-methyladenosine
  modified_base 19: mod_base = cm
  modified_base 20: mod_base = gm
  modified_base 20^21: mod_base = OTHER; note = phosphorothioate linkage
  modified_base 21: mod_base = um
  source 1..21: mol_type = other RNA
tatgatagaaagaacgtacgt

SEQ ID NO: 1185 - RNA, 21 nt, synthetic construct
  modified_base 1: mod_base = OTHER; note = 5'-cyclopropyl phosphonate-2'-O-methyluridine
  modified_base 1^2: mod_base = OTHER; note = phosphorothioate linkage
  modified_base 2: mod_base = OTHER; note = 2'-fluoroadenosine
  modified_base 2^3: mod_base = OTHER; note = phosphorothioate linkage
  modified_base 3: mod_base = um
  modified_base 3^4: mod_base = OTHER; note = phosphorothioate linkage
  modified_base 4: mod_base = gm
  modified_base 5: mod_base = OTHER; note = 2'-O-methyladenosine
  modified_base 6: mod_base = um
  modified_base 7: mod_base = OTHER; note = 2'-fluoroadenosine
  modified_base 8: mod_base = gm
  modified_base 9: mod_base = OTHER; note = 2'-O-methyladenosine
  modified_base 10: mod_base = OTHER; note = 2'-O-methyladenosine
  modified_base 11: mod_base = OTHER; note = 2'-O-methyladenosine
  modified_base 12: mod_base = OTHER; note = 2'-fluoroguanosine
  modified_base 13: mod_base = OTHER; note = 2'-O-methyladenosine
  modified_base 14: mod_base = OTHER; note = 2'-fluoroadenosine
  modified_base 15: mod_base = cm
  modified_base 16: mod_base = OTHER; note = 2'-fluoroguanosine
  modified_base 17: mod_base = um
  modified_base 18: mod_base = OTHER; note = 2'-O-methyladenosine
  modified_base 19: mod_base = cm
  modified_base 20: mod_base = gm
  modified_base 20^21: mod_base = OTHER; note = phosphorothioate linkage
  modified_base 21: mod_base = um
  source 1..21: mol_type = other RNA
tatgatagaaagaacgtacgt

SEQ ID NO: 1186 - RNA, 21 nt, synthetic construct
  modified_base 1: mod_base = OTHER; note = 5'-cyclopropyl phosphonate-2'-O-methyluridine
  modified_base 1^2: mod_base = OTHER; note = phosphorothioate linkage
  modified_base 2: mod_base = OTHER; note = 2'-fluoroadenosine
  modified_base 2^3: mod_base = OTHER; note = phosphorothioate linkage
  modified_base 3: mod_base = um
  modified_base 3^4: mod_base = OTHER; note = phosphorothioate linkage
  modified_base 4: mod_base = gm
  modified_base 5: mod_base = OTHER; note = 2'-O-methyladenosine
  modified_base 6: mod_base = um
  modified_base 7: mod_base = OTHER; note = 2'-O-methyladenosine
  modified_base 8: mod_base = gm
  modified_base 9: mod_base = OTHER; note = 2'-fluoroadenosine
  modified_base 10: mod_base = OTHER; note = 2'-O-methyladenosine
  modified_base 11: mod_base = OTHER; note = 2'-O-methyladenosine
  modified_base 12: mod_base = OTHER; note = 2'-fluoroguanosine
  modified_base 13: mod_base = OTHER; note = 2'-O-methyladenosine
  modified_base 14: mod_base = OTHER; note = 2'-fluoroadenosine
  modified_base 15: mod_base = cm
  modified_base 16: mod_base = OTHER; note = 2'-fluoroguanosine
  modified_base 17: mod_base = um
  modified_base 18: mod_base = OTHER; note = 2'-O-methyladenosine
  modified_base 19: mod_base = cm
  modified_base 20: mod_base = gm
  modified_base 20^21: mod_base = OTHER; note = phosphorothioate linkage
  modified_base 21: mod_base = um
  source 1..21: mol_type = other RNA
tatgatagaaagaacgtacgt

SEQ ID NO: 1187 - RNA, 21 nt, synthetic construct
  modified_base 1: mod_base = OTHER; note = 5'-cyclopropyl phosphonate-2'-O-methyluridine
  modified_base 1^2: mod_base = OTHER; note = phosphorothioate linkage
  modified_base 2: mod_base = OTHER; note = 2'-fluoroadenosine
  modified_base 2^3: mod_base = OTHER; note = phosphorothioate linkage
  modified_base 3: mod_base = um
  modified_base 3^4: mod_base = OTHER; note = phosphorothioate linkage
  modified_base 4: mod_base = OTHER; note = 2'-fluoroguanosine
  modified_base 5: mod_base = OTHER; note = 2'-O-methyladenosine
  modified_base 6: mod_base = um
  modified_base 7: mod_base = OTHER; note = 2'-O-methyladenosine
  modified_base 8: mod_base = gm
  modified_base 9: mod_base = OTHER; note = 2'-O-methyladenosine
  modified_base 10: mod_base = OTHER; note = 2'-O-methyladenosine
  modified_base 11: mod_base = OTHER; note = 2'-O-methyladenosine
  modified_base 12: mod_base = OTHER; note = 2'-fluoroguanosine
  modified_base 13: mod_base = OTHER; note = 2'-O-methyladenosine
  modified_base 14: mod_base = OTHER; note = 2'-fluoroadenosine
  modified_base 15: mod_base = cm
  modified_base 16: mod_base = OTHER; note = 2'-fluoroguanosine
  modified_base 17: mod_base = um
  modified_base 18: mod_base = OTHER; note = 2'-O-methyladenosine
  modified_base 19: mod_base = cm
  modified_base 20: mod_base = gm
  modified_base 20^21: mod_base = OTHER; note = phosphorothioate linkage
  modified_base 21: mod_base = um
  source 1..21: mol_type = other RNA
tatgatagaaagaacgtacgt

SEQ ID NO: 1188 - RNA, 21 nt, synthetic construct
  modified_base 1: mod_base = OTHER; note = 5'-cyclopropyl phosphonate-2'-O-methyluridine
  modified_base 1^2: mod_base = OTHER; note = phosphorothioate linkage
  modified_base 2: mod_base = OTHER; note = 2'-fluoroadenosine
  modified_base 2^3: mod_base = OTHER; note = phosphorothioate linkage
  modified_base 3: mod_base = OTHER; note = 2'-fluorouridine
  modified_base 4: mod_base = gm
  modified_base 5: mod_base = OTHER; note = 2'-O-methyladenosine
  modified_base 6: mod_base = um
  modified_base 7: mod_base = OTHER; note = 2'-O-methyladenosine
  modified_base 8: mod_base = gm
  modified_base 9: mod_base = OTHER; note = 2'-O-methyladenosine
  modified_base 10: mod_base = OTHER; note = 2'-O-methyladenosine
  modified_base 11: mod_base = OTHER; note = 2'-O-methyladenosine
  modified_base 12: mod_base = OTHER; note = 2'-fluoroguanosine
  modified_base 13: mod_base = OTHER; note = 2'-O-methyladenosine
  modified_base 14: mod_base = OTHER; note = 2'-fluoroadenosine
  modified_base 15: mod_base = cm
  modified_base 16: mod_base = OTHER; note = 2'-fluoroguanosine
  modified_base 17: mod_base = um
  modified_base 18: mod_base = OTHER; note = 2'-O-methyladenosine
  modified_base 19: mod_base = cm
  modified_base 20: mod_base = gm
  modified_base 20^21: mod_base = OTHER; note = phosphorothioate linkage
  modified_base 21: mod_base = um
  source 1..21: mol_type = other RNA
tatgatagaaagaacgtacgt

SEQ ID NO: 1189 - RNA, 21 nt, synthetic construct
  modified_base 1: mod_base = OTHER; note = 5'-cyclopropyl phosphonate-2'-O-methyluridine
  modified_base 1^2: mod_base = OTHER; note = phosphorothioate linkage
  modified_base 2: mod_base = OTHER; note = 2'-fluoroadenosine
  modified_base 2^3: mod_base = OTHER; note = phosphorothioate linkage
  modified_base 3: mod_base = um
  modified_base 4: mod_base = OTHER; note = 2'-fluoroguanosine
  modified_base 5: mod_base = OTHER; note = 2'-O-methyladenosine
  modified_base 6: mod_base = um
  modified_base 7: mod_base = OTHER; note = 2'-O-methyladenosine
  modified_base 8: mod_base = gm
  modified_base 9: mod_base = OTHER; note = 2'-O-methyladenosine
  modified_base 10: mod_base = OTHER; note = 2'-O-methyladenosine
  modified_base 11: mod_base = OTHER; note = 2'-O-methyladenosine
  modified_base 12: mod_base = OTHER; note = 2'-fluoroguanosine
  modified_base 13: mod_base = OTHER; note = 2'-O-methyladenosine
  modified_base 14: mod_base = OTHER; note = 2'-fluoroadenosine
  modified_base 15: mod_base = cm
  modified_base 16: mod_base = OTHER; note = 2'-fluoroguanosine
  modified_base 17: mod_base = um
  modified_base 18: mod_base = OTHER; note = 2'-O-methyladenosine
  modified_base 19: mod_base = cm
  modified_base 20: mod_base = gm
  modified_base 20^21: mod_base = OTHER; note = phosphorothioate linkage
  modified_base 21: mod_base = um
  source 1..21: mol_type = other RNA
tatgatagaaagaacgtacgt

SEQ ID NO: 1190 - RNA, 21 nt, synthetic construct
  modified_base 1: mod_base = OTHER; note = 5'-cyclopropyl phosphonate-2'-O-methyluridine
  modified_base 1^2: mod_base = OTHER; note = phosphorothioate linkage
  modified_base 2: mod_base = OTHER; note = 2'-fluoroadenosine
  modified_base 2^3: mod_base = OTHER; note = phosphorothioate linkage
  modified_base 3: mod_base = um
  modified_base 4: mod_base = gm
  modified_base 5: mod_base = OTHER; note = 2'-fluoroadenosine
  modified_base 6: mod_base = um
  modified_base 7: mod_base = OTHER; note = 2'-O-methyladenosine
  modified_base 8: mod_base = gm
  modified_base 9: mod_base = OTHER; note = 2'-O-methyladenosine
  modified_base 10: mod_base = OTHER; note = 2'-O-methyladenosine
  modified_base 11: mod_base = OTHER; note = 2'-O-methyladenosine
  modified_base 12: mod_base = OTHER; note = 2'-fluoroguanosine
  modified_base 13: mod_base = OTHER; note = 2'-O-methyladenosine
  modified_base 14: mod_base = OTHER; note = 2'-fluoroadenosine
  modified_base 15: mod_base = cm
  modified_base 16: mod_base = OTHER; note = 2'-fluoroguanosine
  modified_base 17: mod_base = um
  modified_base 18: mod_base = OTHER; note = 2'-O-methyladenosine
  modified_base 19: mod_base = cm
  modified_base 20: mod_base = gm
  modified_base 20^21: mod_base = OTHER; note = phosphorothioate linkage
  modified_base 21: mod_base = um
  source 1..21: mol_type = other RNA
tatgatagaaagaacgtacgt

SEQ ID NO: 1191 - RNA, 21 nt, synthetic construct
  modified_base 1: mod_base = OTHER; note = 5'-cyclopropyl phosphonate-2'-O-methyluridine
  modified_base 1^2: mod_base = OTHER; note = phosphorothioate linkage
  modified_base 2: mod_base = OTHER; note = 2'-fluoroadenosine
  modified_base 2^3: mod_base = OTHER; note = phosphorothioate linkage
  modified_base 3: mod_base = um
  modified_base 4: mod_base = gm
  modified_base 5: mod_base = OTHER; note = 2'-O-methyladenosine
  modified_base 6: mod_base = um
  modified_base 7: mod_base = OTHER; note = 2'-fluoroadenosine
  modified_base 8: mod_base = gm
  modified_base 9: mod_base = OTHER; note = 2'-O-methyladenosine
  modified_base 10: mod_base = OTHER; note = 2'-O-methyladenosine
  modified_base 11: mod_base = OTHER; note = 2'-O-methyladenosine
  modified_base 12: mod_base = OTHER; note = 2'-fluoroguanosine
  modified_base 13: mod_base = OTHER; note = 2'-O-methyladenosine
  modified_base 14: mod_base = OTHER; note = 2'-fluoroadenosine
  modified_base 15: mod_base = cm
  modified_base 16: mod_base = OTHER; note = 2'-fluoroguanosine
  modified_base 17: mod_base = um
  modified_base 18: mod_base = OTHER; note = 2'-O-methyladenosine
  modified_base 19: mod_base = cm
  modified_base 20: mod_base = gm
  modified_base 20^21: mod_base = OTHER; note = phosphorothioate linkage
  modified_base 21: mod_base = um
  source 1..21: mol_type = other RNA
tatgatagaaagaacgtacgt

SEQ ID NO: 1192 - RNA, 21 nt, synthetic construct
  modified_base 1: mod_base = OTHER; note = 5'-cyclopropyl phosphonate-2'-O-methyluridine
  modified_base 1^2: mod_base = OTHER; note = phosphorothioate linkage
  modified_base 2: mod_base = OTHER; note = 2'-fluoroadenosine
  modified_base 2^3: mod_base = OTHER; note = phosphorothioate linkage
  modified_base 3: mod_base = um
  modified_base 4: mod_base = gm
  modified_base 5: mod_base = OTHER; note = 2'-O-methyladenosine
  modified_base 6: mod_base = um
  modified_base 7: mod_base = OTHER; note = 2'-O-methyladenosine
  modified_base 8: mod_base = gm
  modified_base 9: mod_base = OTHER; note = 2'-fluoroadenosine
  modified_base 10: mod_base = OTHER; note = 2'-O-methyladenosine
  modified_base 11: mod_base = OTHER; note = 2'-O-methyladenosine
  modified_base 12: mod_base = OTHER; note = 2'-fluoroguanosine
  modified_base 13: mod_base = OTHER; note = 2'-O-methyladenosine
  modified_base 14: mod_base = OTHER; note = 2'-fluoroadenosine
  modified_base 15: mod_base = cm
  modified_base 16: mod_base = OTHER; note = 2'-fluoroguanosine
  modified_base 17: mod_base = um
  modified_base 18: mod_base = OTHER; note = 2'-O-methyladenosine
  modified_base 19: mod_base = cm
  modified_base 20: mod_base = gm
  modified_base 20^21: mod_base = OTHER; note = phosphorothioate linkage
  modified_base 21: mod_base = um
  source 1..21: mol_type = other RNA
tatgatagaaagaacgtacgt

SEQ ID NO: 1193 - RNA, 21 nt, synthetic construct
  modified_base 1: mod_base = um
  modified_base 1^2: mod_base = OTHER; note = phosphorothioate linkage
  modified_base 2: mod_base = OTHER; note = 2'-fluoroadenosine
  modified_base 2^3: mod_base = OTHER; note = phosphorothioate linkage
  modified_base 3: mod_base = um
  modified_base 3^4: mod_base = OTHER; note = phosphorothioate linkage
  modified_base 4: mod_base = OTHER; note = 2'-fluorocytidine
  modified_base 5: mod_base = OTHER; note = 2'-O-methyladenosine
  modified_base 6: mod_base = OTHER; note = 2'-fluoroadenosine
  modified_base 7: mod_base = gm
  modified_base 8: mod_base = gm
  modified_base 9: mod_base = OTHER; note = 2'-O-methyladenosine
  modified_base 10: mod_base = OTHER; note = 2'-O-methyladenosine
  modified_base 11: mod_base = um
  modified_base 12: mod_base = OTHER; note = 2'-fluoroguanosine
  modified_base 13: mod_base = gm
  modified_base 14: mod_base = OTHER; note = 2'-fluoroguanosine
  modified_base 15: mod_base = gm
  modified_base 16: mod_base = OTHER; note = 2'-fluorocytidine
  modified_base 17: mod_base = OTHER; note = 2'-O-methyladenosine
  modified_base 18: mod_base = OTHER; note = 2'-fluorouridine
  modified_base 19: mod_base = cm
  modified_base 20: mod_base = OTHER; note = 2'-O-methyladenosine
  modified_base 20^21: mod_base = OTHER; note = phosphorothioate linkage
  modified_base 21: mod_base = cm
  source 1..21: mol_type = other RNA
tatcaaggaatggggcatcac

SEQ ID NO: 1194 - RNA, 21 nt, synthetic construct
  modified_base 1: mod_base = um
  modified_base 1^2: mod_base = OTHER; note = phosphorothioate linkage
  modified_base 2: mod_base = OTHER; note = 2'-fluoroguanosine
  modified_base 2^3: mod_base = OTHER; note = phosphorothioate linkage
  modified_base 3: mod_base = OTHER; note = 2'-O-methyladenosine
  modified_base 3^4: mod_base = OTHER; note = phosphorothioate linkage
  modified_base 4: mod_base = OTHER; note = 2'-fluorouridine
  modified_base 5: mod_base = cm
  modified_base 6: mod_base = OTHER; note = 2'-fluoroadenosine
  modified_base 7: mod_base = OTHER; note = 2'-O-methyladenosine
  modified_base 8: mod_base = gm
  modified_base 9: mod_base = gm
  modified_base 10: mod_base = OTHER; note = 2'-O-methyladenosine
  modified_base 11: mod_base = OTHER; note = 2'-O-methyladenosine
  modified_base 12: mod_base = OTHER; note = 2'-fluorouridine
  modified_base 13: mod_base = gm
  modified_base 14: mod_base = OTHER; note = 2'-fluoroguanosine
  modified_base 15: mod_base = gm
  modified_base 16: mod_base = OTHER; note = 2'-fluoroguanosine
  modified_base 17: mod_base = cm
  modified_base 18: mod_base = OTHER; note = 2'-fluoroadenosine
  modified_base 19: mod_base = um
  modified_base 20: mod_base = cm
  modified_base 20^21: mod_base = OTHER; note = phosphorothioate linkage
  modified_base 21: mod_base = OTHER; note = 2'-O-methyladenosine
  source 1..21: mol_type = other RNA
tgatcaaggaatggggcatca

SEQ ID NO: 1195 - RNA, 21 nt, synthetic construct
  modified_base 1: mod_base = um
  modified_base 1^2: mod_base = OTHER; note = phosphorothioate linkage
  modified_base 2: mod_base = OTHER; note = 2'-fluorocytidine
  modified_base 2^3: mod_base = OTHER; note = phosphorothioate linkage
  modified_base 3: mod_base = gm
  modified_base 3^4: mod_base = OTHER; note = phosphorothioate linkage
  modified_base 4: mod_base = OTHER; note = 2'-fluoroadenosine
  modified_base 5: mod_base = um
  modified_base 6: mod_base = OTHER; note = 2'-fluorocytidine
  modified_base 7: mod_base = OTHER; note = 2'-O-methyladenosine
  modified_base 8: mod_base = OTHER; note = 2'-O-methyladenosine
  modified_base 9: mod_base = gm
  modified_base 10: mod_base = gm
  modified_base 11: mod_base = OTHER; note = 2'-O-methyladenosine
  modified_base 12: mod_base = OTHER; note = 2'-fluoroadenosine
  modified_base 13: mod_base = um
  modified_base 14: mod_base = OTHER; note = 2'-fluoroguanosine
  modified_base 15: mod_base = gm
  modified_base 16: mod_base = OTHER; note = 2'-fluoroguanosine
  modified_base 17: mod_base = gm
  modified_base 18: mod_base = OTHER; note = 2'-fluorocytidine
  modified_base 19: mod_base = OTHER; note = 2'-O-methyladenosine
  modified_base 20: mod_base = um
  modified_base 20^21: mod_base = OTHER; note = phosphorothioate linkage
  modified_base 21: mod_base = cm
  source 1..21: mol_type = other RNA
tcgatcaaggaatggggcatc

SEQ ID NO: 1196 - RNA, 21 nt, synthetic construct
  modified_base 1: mod_base = um
  modified_base 1^2: mod_base = OTHER; note = phosphorothioate linkage
  modified_base 2: mod_base = OTHER; note = 2'-fluoroguanosine
  modified_base 2^3: mod_base = OTHER; note = phosphorothioate linkage
  modified_base 3: mod_base = cm
  modified_base 3^4: mod_base = OTHER; note = phosphorothioate linkage
  modified_base 4: mod_base = OTHER; note = 2'-fluoroadenosine
  modified_base 5: mod_base = um
  modified_base 6: mod_base = OTHER; note = 2'-fluorouridine
  modified_base 7: mod_base = um
  modified_base 8: mod_base = um
  modified_base 9: mod_base = um
  modified_base 10: mod_base = gm
  modified_base 11: mod_base = OTHER; note = 2'-O-methyladenosine
  modified_base 12: mod_base = OTHER; note = 2'-fluorocytidine
  modified_base 13: mod_base = OTHER; note = 2'-O-methyladenosine
  modified_base 14: mod_base = OTHER; note = 2'-fluorouridine
  modified_base 15: mod_base = cm
  modified_base 16: mod_base = OTHER; note = 2'-fluorocytidine
  modified_base 17: mod_base = um
  modified_base 18: mod_base = OTHER; note = 2'-fluorocytidine
  modified_base 19: mod_base = OTHER; note = 2'-O-methyladenosine
  modified_base 20: mod_base = um
  modified_base 20^21: mod_base = OTHER; note = phosphorothioate linkage
  modified_base 21: mod_base = cm
  source 1..21: mol_type = other RNA
tgcatttttgacatcctcatc

SEQ ID NO: 1197 - RNA, 21 nt, synthetic construct
  modified_base 1: mod_base = um
  modified_base 1^2: mod_base = OTHER; note = phosphorothioate linkage
  modified_base 2: mod_base = OTHER; note = 2'-fluorocytidine
  modified_base 2^3: mod_base = OTHER; note = phosphorothioate linkage
  modified_base 3: mod_base = OTHER; note = 2'-O-methyladenosine
  modified_base 3^4: mod_base = OTHER; note = phosphorothioate linkage
  modified_base 4: mod_base = OTHER; note = 2'-fluorouridine
  modified_base 5: mod_base = um
  modified_base 6: mod_base = OTHER; note = 2'-fluorocytidine
  modified_base 7: mod_base = OTHER; note = 2'-O-methyladenosine
  modified_base 8: mod_base = OTHER; note = 2'-O-methyladenosine
  modified_base 9: mod_base = gm
  modified_base 10: mod_base = um
  modified_base 11: mod_base = cm
  modified_base 12: mod_base = OTHER; note = 2'-fluorocytidine
  modified_base 13: mod_base = um
  modified_base 14: mod_base = OTHER; note = 2'-fluorocytidine
  modified_base 15: mod_base = cm
  modified_base 16: mod_base = OTHER; note = 2'-fluoroguanosine
  modified_base 17: mod_base = OTHER; note = 2'-O-methyladenosine
  modified_base 18: mod_base = OTHER; note = 2'-fluorouridine
  modified_base 19: mod_base = gm
  modified_base 20: mod_base = OTHER; note = 2'-O-methyladenosine
  modified_base 20^21: mod_base = OTHER; note = phosphorothioate linkage
  modified_base 21: mod_base = gm
  source 1..21: mol_type = other RNA
tcattcaagtcctccgatgag

SEQ ID NO: 1198 - RNA, 21 nt, synthetic construct
  modified_base 1: mod_base = um
  modified_base 1^2: mod_base = OTHER; note = phosphorothioate linkage
  modified_base 2: mod_base = OTHER; note = 2'-fluorocytidine
  modified_base 2^3: mod_base = OTHER; note = phosphorothioate linkage
  modified_base 3: mod_base = cm
  modified_base 3^4: mod_base = OTHER; note = phosphorothioate linkage
  modified_base 4: mod_base = OTHER; note = 2'-fluoroadenosine
  modified_base 5: mod_base = um
  modified_base 6: mod_base = OTHER; note = 2'-fluorouridine
  modified_base 7: mod_base = cm
  modified_base 8: mod_base = OTHER; note = 2'-O-methyladenosine
  modified_base 9: mod_base = OTHER; note = 2'-O-methyladenosine
  modified_base 10: mod_base = gm
  modified_base 11: mod_base = um
  modified_base 12: mod_base = OTHER; note = 2'-fluorocytidine
  modified_base 13: mod_base = cm
  modified_base 14: mod_base = OTHER; note = 2'-fluorouridine
  modified_base 15: mod_base = cm
  modified_base 16: mod_base = OTHER; note = 2'-fluorocytidine
  modified_base 17: mod_base = gm
  modified_base 18: mod_base = OTHER; note = 2'-fluoroadenosine
  modified_base 19: mod_base = um
  modified_base 20: mod_base = gm
  modified_base 20^21: mod_base = OTHER; note = phosphorothioate linkage
  modified_base 21: mod_base = OTHER; note = 2'-O-methyladenosine
  source 1..21: mol_type = other RNA
tccattcaagtcctccgatga

SEQ ID NO: 1199 - RNA, 21 nt, synthetic construct
  modified_base 1: mod_base = um
  modified_base 1^2: mod_base = OTHER; note = phosphorothioate linkage
  modified_base 2: mod_base = OTHER; note = 2'-fluorouridine
  modified_base 2^3: mod_base = OTHER; note = phosphorothioate linkage
  modified_base 3: mod_base = cm
  modified_base 3^4: mod_base = OTHER; note = phosphorothioate linkage
  modified_base 4: mod_base = OTHER; note = 2'-fluorocytidine
  modified_base 5: mod_base = OTHER; note = 2'-O-methyladenosine
  modified_base 6: mod_base = OTHER; note = 2'-fluorouridine
  modified_base 7: mod_base = um
  modified_base 8: mod_base = cm
  modified_base 9: mod_base = OTHER; note = 2'-O-methyladenosine
  modified_base 10: mod_base = OTHER; note = 2'-O-methyladenosine
  modified_base 11: mod_base = gm
  modified_base 12: mod_base = OTHER; note = 2'-fluorouridine
  modified_base 13: mod_base = cm
  modified_base 14: mod_base = OTHER; note = 2'-fluorocytidine
  modified_base 15: mod_base = um
  modified_base 16: mod_base = OTHER; note = 2'-fluorocytidine
  modified_base 17: mod_base = cm
  modified_base 18: mod_base = OTHER; note = 2'-fluoroguanosine
  modified_base 19: mod_base = OTHER; note = 2'-O-methyladenosine
  modified_base 20: mod_base = um
  modified_base 20^21: mod_base = OTHER; note = phosphorothioate linkage
  modified_base 21: mod_base = gm
  source 1..21: mol_type = other RNA
ttccattcaagtcctccgatg

SEQ ID NO: 1200 - RNA, 21 nt, synthetic construct
  modified_base 1: mod_base = um
  modified_base 1^2: mod_base = OTHER; note = phosphorothioate linkage
  modified_base 2: mod_base = OTHER; note = 2'-fluoroadenosine
  modified_base 2^3: mod_base = OTHER; note = phosphorothioate linkage
  modified_base 3: mod_base = um
  modified_base 3^4: mod_base = OTHER; note = phosphorothioate linkage
  modified_base 4: mod_base = OTHER; note = 2'-fluorouridine
  modified_base 5: mod_base = cm
  modified_base 6: mod_base = OTHER; note = 2'-fluorocytidine
  modified_base 7: mod_base = OTHER; note = 2'-O-methyladenosine
  modified_base 8: mod_base = um
  modified_base 9: mod_base = um
  modified_base 10: mod_base = cm
  modified_base 11: mod_base = OTHER; note = 2'-O-methyladenosine
  modified_base 12: mod_base = OTHER; note = 2'-fluoroadenosine
  modified_base 13: mod_base = gm
  modified_base 14: mod_base = OTHER; note = 2'-fluorouridine
  modified_base 15: mod_base = cm
  modified_base 16: mod_base = OTHER; note = 2'-fluorocytidine
  modified_base 17: mod_base = um
  modified_base 18: mod_base = OTHER; note = 2'-fluorocytidine
  modified_base 19: mod_base = cm
  modified_base 20: mod_base = gm
  modified_base 20^21: mod_base = OTHER; note = phosphorothioate linkage
  modified_base 21: mod_base = OTHER; note = 2'-O-methyladenosine
  source 1..21: mol_type = other RNA
tattccattcaagtcctccga

SEQ ID NO: 1201 - RNA, 21 nt, synthetic construct
  modified_base 1: mod_base = um
  modified_base 1^2: mod_base = OTHER; note = phosphorothioate linkage
  modified_base 2: mod_base = OTHER; note = 2'-fluorocytidine
  modified_base 2^3: mod_base = OTHER; note = phosphorothioate linkage
  modified_base 3: mod_base = OTHER; note = 2'-O-methyladenosine
  modified_base 3^4: mod_base = OTHER; note = phosphorothioate linkage
  modified_base 4: mod_base = OTHER; note = 2'-fluorouridine
  modified_base 5: mod_base = um
  modified_base 6: mod_base = OTHER; note = 2'-fluorocytidine
  modified_base 7: mod_base = cm
  modified_base 8: mod_base = OTHER; note = 2'-O-methyladenosine
  modified_base 9: mod_base = um
  modified_base 10: mod_base = um
  modified_base 11: mod_base = cm
  modified_base 12: mod_base = OTHER; note = 2'-fluoroadenosine
  modified_base 13: mod_base = OTHER; note = 2'-O-methyladenosine
  modified_base 14: mod_base = OTHER; note = 2'-fluoroguanosine
  modified_base 15: mod_base = um
  modified_base 16: mod_base = OTHER; note = 2'-fluorocytidine
  modified_base 17: mod_base = cm
  modified_base 18: mod_base = OTHER; note = 2'-fluorouridine
  modified_base 19: mod_base = cm
  modified_base 20: mod_base = cm
  modified_base 20^21: mod_base = OTHER; note = phosphorothioate linkage
  modified_base 21: mod_base = gm
  source 1..21: mol_type = other RNA
tcattccattcaagtcctccg

SEQ ID NO: 1202 - RNA, 21 nt, synthetic construct
  modified_base 1: mod_base = um
  modified_base 1^2: mod_base = OTHER; note = phosphorothioate linkage
  modified_base 2: mod_base = OTHER; note = 2'-fluorouridine
  modified_base 2^3: mod_base = OTHER; note = phosphorothioate linkage
  modified_base 3: mod_base = cm
  modified_base 3^4: mod_base = OTHER; note = phosphorothioate linkage
  modified_base 4: mod_base = OTHER; note = 2'-fluorocytidine
  modified_base 5: mod_base = OTHER; note = 2'-O-methyladenosine
  modified_base 6: mod_base = OTHER; note = 2'-fluoroadenosine
  modified_base 7: mod_base = gm
  modified_base 8: mod_base = cm
  modified_base 9: mod_base = gm
  modified_base 10: mod_base = OTHER; note = 2'-O-methyladenosine
  modified_base 11: mod_base = OTHER; note = 2'-O-methyladenosine
  modified_base 12: mod_base = OTHER; note = 2'-fluorouridine
  modified_base 13: mod_base = cm
  modified_base 14: mod_base = OTHER; note = 2'-fluorouridine
  modified_base 15: mod_base = cm
  modified_base 16: mod_base = OTHER; note = 2'-fluorouridine
  modified_base 17: mod_base = gm
  modified_base 18: mod_base = OTHER; note = 2'-fluorouridine
  modified_base 19: mod_base = OTHER; note = 2'-O-methyladenosine
  modified_base 20: mod_base = um
  modified_base 20^21: mod_base = OTHER; note = phosphorothioate linkage
  modified_base 21: mod_base = cm
  source 1..21: mol_type = other RNA
ttccaagcgaatctctgtatc

SEQ ID NO: 1203 - RNA, 21 nt, synthetic construct
  modified_base 1: mod_base = um
  modified_base 1^2: mod_base = OTHER; note = phosphorothioate linkage
  modified_base 2: mod_base = OTHER; note = 2'-fluorocytidine
  modified_base 2^3: mod_base = OTHER; note = phosphorothioate linkage
  modified_base 3: mod_base = OTHER; note = 2'-O-methyladenosine
  modified_base 3^4: mod_base = OTHER; note = phosphorothioate linkage
  modified_base 4: mod_base = OTHER; note = 2'-fluorouridine
  modified_base 5: mod_base = gm
  modified_base 6: mod_base = OTHER; note = 2'-fluoroadenosine
  modified_base 7: mod_base = gm
  modified_base 8: mod_base = cm
  modified_base 9: mod_base = OTHER; note = 2'-O-methyladenosine
  modified_base 10: mod_base = um
  modified_base 11: mod_base = gm
  modified_base 12: mod_base = OTHER; note = 2'-fluoroadenosine
  modified_base 13: mod_base = OTHER; note = 2'-O-methyladenosine
  modified_base 14: mod_base = OTHER; note = 2'-fluorocytidine
  modified_base 15: mod_base = cm
  modified_base 16: mod_base = OTHER; note = 2'-fluoroadenosine
  modified_base 17: mod_base = gm
  modified_base 18: mod_base = OTHER; note = 2'-fluorouridine
  modified_base 19: mod_base = cm
  modified_base 20: mod_base = um
  modified_base 20^21: mod_base = OTHER; note = phosphorothioate linkage
  modified_base 21: mod_base = cm
  source 1..21: mol_type = other RNA
tcatgagcatgaaccagtctc

SEQ ID NO: 1204 - RNA, 21 nt, synthetic construct
  modified_base 1: mod_base = OTHER; note = 2'-O-methyladenosine
  modified_base 1^2: mod_base = OTHER; note = phosphorothioate linkage
  modified_base 2: mod_base = OTHER; note = 2'-fluorocytidine
  modified_base 2^3: mod_base = OTHER; note = phosphorothioate linkage
  modified_base 3: mod_base = OTHER; note = 2'-O-methyladenosine
  modified_base 3^4: mod_base = OTHER; note = phosphorothioate linkage
  modified_base 4: mod_base = OTHER; note = 2'-fluorocytidine
  modified_base 5: mod_base = um
  modified_base 6: mod_base = OTHER; note = 2'-fluoroguanosine
  modified_base 7: mod_base = OTHER; note = 2'-O-methyladenosine
  modified_base 8: mod_base = OTHER; note = 2'-O-methyladenosine
  modified_base 9: mod_base = gm
  modified_base 10: mod_base = um
  modified_base 11: mod_base = um
  modified_base 12: mod_base = OTHER; note = 2'-fluorocytidine
  modified_base 13: mod_base = gm
  modified_base 14: mod_base = OTHER; note = 2'-fluorocytidine
  modified_base 15: mod_base = um
  modified_base 16: mod_base = OTHER; note = 2'-fluorouridine
  modified_base 17: mod_base = um
  modified_base 18: mod_base = OTHER; note = 2'-fluorocytidine
  modified_base 19: mod_base = OTHER; note = 2'-O-methyladenosine
  modified_base 20: mod_base = gm
  modified_base 20^21: mod_base = OTHER; note = phosphorothioate linkage
  modified_base 21: mod_base = um
  source 1..21: mol_type = other RNA
acactgaagttcgctttcagt

SEQ ID NO: 1205 - RNA, 21 nt, synthetic construct
  modified_base 1: mod_base = OTHER; note = 2'-O-methyladenosine
  modified_base 1^2: mod_base = OTHER; note = phosphorothioate linkage
  modified_base 2: mod_base = OTHER; note = 2'-fluoroguanosine
  modified_base 2^3: mod_base = OTHER; note = phosphorothioate linkage
  modified_base 3: mod_base = um
  modified_base 3^4: mod_base = OTHER; note = phosphorothioate linkage
  modified_base 4: mod_base = OTHER; note = 2'-fluoroguanosine
  modified_base 5: mod_base = OTHER; note = 2'-O-methyladenosine
  modified_base 6: mod_base = OTHER; note = 2'-fluoroadenosine
  modified_base 7: mod_base = OTHER; note = 2'-O-methyladenosine
  modified_base 8: mod_base = gm
  modified_base 9: mod_base = cm
  modified_base 10: mod_base = cm
  modified_base 11: mod_base = cm
  modified_base 12: mod_base = OTHER; note = 2'-fluorouridine
  modified_base 13: mod_base = um
  modified_base 14: mod_base = OTHER; note = 2'-fluoroadenosine
  modified_base 15: mod_base = gm
  modified_base 16: mod_base = OTHER; note = 2'-fluorouridine
  modified_base 17: mod_base = OTHER; note = 2'-O-methyladenosine
  modified_base 18: mod_base = OTHER; note = 2'-fluoroguanosine
  modified_base 19: mod_base = um
  modified_base 20: mod_base = OTHER; note = 2'-O-methyladenosine
  modified_base 20^21: mod_base = OTHER; note = phosphorothioate linkage
  modified_base 21: mod_base = cm
  source 1..21: mol_type = other RNA
agtgaaagcccttagtagtac

SEQ ID NO: 1206 - RNA, 21 nt, synthetic construct
  modified_base 1: mod_base = um
  modified_base 1^2: mod_base = OTHER; note = phosphorothioate linkage
  modified_base 2: mod_base = OTHER; note = 2'-fluoroadenosine
  modified_base 2^3: mod_base = OTHER; note = phosphorothioate linkage
  modified_base 3: mod_base = gm
  modified_base 3^4: mod_base = OTHER; note = phosphorothioate linkage
  modified_base 4: mod_base = OTHER; note = 2'-fluorouridine
  modified_base 5: mod_base = gm
  modified_base 6: mod_base = OTHER; note = 2'-fluoroadenosine
  modified_base 7: mod_base = OTHER; note = 2'-O-methyladenosine
  modified_base 8: mod_base = OTHER; note = 2'-O-methyladenosine
  modified_base 9: mod_base = gm
  modified_base 10: mod_base = cm
  modified_base 11: mod_base = cm
  modified_base 12: mod_base = OTHER; note = 2'-fluorocytidine
  modified_base 13: mod_base = um
  modified_base 14: mod_base = OTHER; note = 2'-fluorouridine
  modified_base 15: mod_base = OTHER; note = 2'-O-methyladenosine
  modified_base 16: mod_base = OTHER; note = 2'-fluoroguanosine
  modified_base 17: mod_base = um
  modified_base 18: mod_base = OTHER; note = 2'-fluoroadenosine
  modified_base 19: mod_base = gm
  modified_base 20: mod_base = um
  modified_base 20^21: mod_base = OTHER; note = phosphorothioate linkage
  modified_base 21: mod_base = cm
  source 1..21: mol_type = other RNA
tagtgaaagcccttagtagtc

SEQ ID NO: 1207 - RNA, 21 nt, synthetic construct
  modified_base 1: mod_base = OTHER; note = 2'-O-methyladenosine
  modified_base 1^2: mod_base = OTHER; note = phosphorothioate linkage
  modified_base 2: mod_base = OTHER; note = 2'-fluoroadenosine
  modified_base 2^3: mod_base = OTHER; note = phosphorothioate linkage
  modified_base 3: mod_base = gm
  modified_base 3^4: mod_base = OTHER; note = phosphorothioate linkage
  modified_base 4: mod_base = OTHER; note = 2'-fluorouridine
  modified_base 5: mod_base = OTHER; note = 2'-O-methyladenosine
  modified_base 6: mod_base = OTHER; note = 2'-fluorouridine
  modified_base 7: mod_base = gm
  modified_base 8: mod_base = um
  modified_base 9: mod_base = cm
  modified_base 10: mod_base = cm
  modified_base 11: mod_base = um
  modified_base 12: mod_base = OTHER; note = 2'-fluoroguanosine
  modified_base 13: mod_base = gm
  modified_base 14: mod_base = OTHER; note = 2'-fluoroadenosine
  modified_base 15: mod_base = OTHER; note = 2'-O-methyladenosine
  modified_base 16: mod_base = OTHER; note = 2'-fluoroguanosine
  modified_base 17: mod_base = OTHER; note = 2'-O-methyladenosine
  modified_base 18: mod_base = OTHER; note = 2'-fluoroguanosine
  modified_base 19: mod_base = OTHER; note = 2'-O-methyladenosine
  modified_base 20: mod_base = OTHER; note = 2'-O-methyladenosine
  modified_base 20^21: mod_base = OTHER; note = phosphorothioate linkage
  modified_base 21: mod_base = gm
  source 1..21: mol_type = other RNA
aagtatgtcctggaagagaag

SEQ ID NO: 1208 - RNA, 21 nt, synthetic construct
  modified_base 1: mod_base = um
  modified_base 1^2: mod_base = OTHER; note = phosphorothioate linkage
  modified_base 2: mod_base = OTHER; note = 2'-fluorocytidine
  modified_base 2^3: mod_base = OTHER; note = phosphorothioate linkage
  modified_base 3: mod_base = cm
  modified_base 3^4: mod_base = OTHER; note = phosphorothioate linkage
  modified_base 4: mod_base = OTHER; note = 2'-fluoroadenosine
  modified_base 5: mod_base = OTHER; note = 2'-O-methyladenosine
  modified_base 6: mod_base = OTHER; note = 2'-fluorocytidine
  modified_base 7: mod_base = um
  modified_base 8: mod_base = gm
  modified_base 9: mod_base = cm
  modified_base 10: mod_base = OTHER; note = 2'-O-methyladenosine
  modified_base 11: mod_base = um
  modified_base 12: mod_base = OTHER; note = 2'-fluorouridine
  modified_base 13: mod_base = um
  modified_base 14: mod_base = OTHER; note = 2'-fluorouridine
  modified_base 15: mod_base = um
  modified_base 16: mod_base = OTHER; note = 2'-fluoroguanosine
  modified_base 17: mod_base = OTHER; note = 2'-O-methyladenosine
  modified_base 18: mod_base = OTHER; note = 2'-fluorocytidine
  modified_base 19: mod_base = OTHER; note = 2'-O-methyladenosine
  modified_base 20: mod_base = um
  modified_base 20^21: mod_base = OTHER; note = phosphorothioate linkage
  modified_base 21: mod_base = cm
  source 1..21: mol_type = other RNA
tccaactgcatttttgacatc

SEQ ID NO: 1209 - RNA, 21 nt, synthetic construct
  modified_base 1: mod_base = um
  modified_base 1^2: mod_base = OTHER; note = phosphorothioate linkage
  modified_base 2: mod_base = OTHER; note = 2'-fluoroadenosine
  modified_base 2^3: mod_base = OTHER; note = phosphorothioate linkage
  modified_base 3: mod_base = um
  modified_base 3^4: mod_base = OTHER; note = phosphorothioate linkage
  modified_base 4: mod_base = OTHER; note = 2'-fluoroguanosine
  modified_base 5: mod_base = OTHER; note = 2'-O-methyladenosine
  modified_base 6: mod_base = OTHER; note = 2'-fluoroguanosine
  modified_base 7: mod_base = gm
  modified_base 8: mod_base = OTHER; note = 2'-O-methyladenosine
  modified_base 9: mod_base = cm
  modified_base 10: mod_base = cm
  modified_base 11: mod_base = cm
  modified_base 12: mod_base = OTHER; note = 2'-fluorocytidine
  modified_base 13: mod_base = OTHER; note = 2'-O-methyladenosine
  modified_base 14: mod_base = OTHER; note = 2'-fluoroadenosine
  modified_base 15: mod_base = cm
  modified_base 16: mod_base = OTHER; note = 2'-fluorouridine
  modified_base 17: mod_base = gm
  modified_base 18: mod_base = OTHER; note = 2'-fluorocytidine
  modified_base 19: mod_base = OTHER; note = 2'-O-methyladenosine
  modified_base 20: mod_base = um
  modified_base 20^21: mod_base = OTHER; note = phosphorothioate linkage
  modified_base 21: mod_base = cm
  source 1..21: mol_type = other RNA
tatgaggaccccaactgcatc

SEQ ID NO: 1210 - RNA, 21 nt, synthetic construct
  modified_base 1: mod_base = um
  modified_base 1^2: mod_base = OTHER; note = phosphorothioate linkage
  modified_base 2: mod_base = OTHER; note = 2'-fluorouridine
  modified_base 2^3: mod_base = OTHER; note = phosphorothioate linkage
  modified_base 3: mod_base = gm
  modified_base 3^4: mod_base = OTHER; note = phosphorothioate linkage
  modified_base 4: mod_base = OTHER; note = 2'-fluorouridine
  modified_base 5: mod_base = um
  modified_base 6: mod_base = OTHER; note = 2'-fluoroadenosine
  modified_base 7: mod_base = cm
  modified_base 8: mod_base = cm
  modified_base 9: mod_base = OTHER; note = 2'-O-methyladenosine
  modified_base 10: mod_base = um
  modified_base 11: mod_base = um
  modified_base 12: mod_base = OTHER; note = 2'-fluorocytidine
  modified_base 13: mod_base = cm
  modified_base 14: mod_base = OTHER; note = 2'-fluoroadenosine
  modified_base 15: mod_base = um
  modified_base 16: mod_base = OTHER; note = 2'-fluorouridine
  modified_base 17: mod_base = cm
  modified_base 18: mod_base = OTHER; note = 2'-fluoroadenosine
  modified_base 19: mod_base = OTHER; note = 2'-O-methyladenosine
  modified_base 20: mod_base = gm
  modified_base 20^21: mod_base = OTHER; note = phosphorothioate linkage
  modified_base 21: mod_base = cm
  source 1..21: mol_type = other RNA
ttgttaccattccattcaagc

SEQ ID NO: 1211 - RNA, 21 nt, synthetic construct
  modified_base 1: mod_base = um
  modified_base 1^2: mod_base = OTHER; note = phosphorothioate linkage
  modified_base 2: mod_base = OTHER; note = 2'-fluoroadenosine
  modified_base 2^3: mod_base = OTHER; note = phosphorothioate linkage
  modified_base 3: mod_base = gm
  modified_base 3^4: mod_base = OTHER; note = phosphorothioate linkage
  modified_base 4: mod_base = OTHER; note = 2'-fluoroadenosine
  modified_base 5: mod_base = cm
  modified_base 6: mod_base = OTHER; note = 2'-fluorouridine
  modified_base 7: mod_base = cm
  modified_base 8: mod_base = gm
  modified_base 9: mod_base = OTHER; note = 2'-O-methyladenosine
  modified_base 10: mod_base = OTHER; note = 2'-O-methyladenosine
  modified_base 11: mod_base = cm
  modified_base 12: mod_base = OTHER; note = 2'-fluorocytidine
  modified_base 13: mod_base = gm
  modified_base 14: mod_base = OTHER; note = 2'-fluorouridine
  modified_base 15: mod_base = gm
  modified_base 16: mod_base = OTHER; note = 2'-fluorouridine
  modified_base 17: mod_base = um
  modified_base 18: mod_base = OTHER; note = 2'-fluoroadenosine
  modified_base 19: mod_base = cm
  modified_base 20: mod_base = cm
  modified_base 20^21: mod_base = OTHER; note = phosphorothioate linkage
  modified_base 21: mod_base = OTHER; note = 2'-O-methyladenosine
  source 1..21: mol_type = other RNA
tagactcgaaccgtgttacca

SEQ ID NO: 1212 - RNA, 21 nt, synthetic construct
  modified_base 1: mod_base = OTHER; note = 2'-O-methyladenosine
  modified_base 1^2: mod_base = OTHER; note = phosphorothioate linkage
  modified_base 2: mod_base = OTHER; note = 2'-fluoroadenosine
  modified_base 2^3: mod_base = OTHER; note = phosphorothioate linkage
  modified_base 3: mod_base = gm
  modified_base 3^4: mod_base = OTHER; note = phosphorothioate linkage
  modified_base 4: mod_base = OTHER; note = 2'-fluoroguanosine
  modified_base 5: mod_base = um
  modified_base 6: mod_base = OTHER; note = 2'-fluorocytidine
  modified_base 7: mod_base = um
  modified_base 8: mod_base = cm
  modified_base 9: mod_base = cm
  modified_base 10: mod_base = cm
  modified_base 11: mod_base = OTHER; note = 2'-O-methyladenosine
  modified_base 12: mod_base = OTHER; note = 2'-fluorouridine
  modified_base 13: mod_base = um
  modified_base 14: mod_base = OTHER; note = 2'-fluorocytidine
  modified_base 15: mod_base = um
  modified_base 16: mod_base = OTHER; note = 2'-fluorocytidine
  modified_base 17: mod_base = OTHER; note = 2'-O-methyladenosine
  modified_base 18: mod_base = OTHER; note = 2'-fluorouridine
  modified_base 19: mod_base = cm
  modified_base 20: mod_base = OTHER; note = 2'-O-methyladenosine
  modified_base 20^21: mod_base = OTHER; note = phosphorothioate linkage
  modified_base 21: mod_base = cm
  source 1..21: mol_type = other RNA
aaggtctcccattctcatcac

SEQ ID NO: 1213 - RNA, 21 nt, synthetic construct
  modified_base 1: mod_base = um
  modified_base 1^2: mod_base = OTHER; note = phosphorothioate linkage
  modified_base 2: mod_base = OTHER; note = 2'-fluoroadenosine
  modified_base 2^3: mod_base = OTHER; note = phosphorothioate linkage
  modified_base 3: mod_base = gm
  modified_base 3^4: mod_base = OTHER; note = phosphorothioate linkage
  modified_base 4: mod_base = OTHER; note = 2'-fluorouridine
  modified_base 5: mod_base = um
  modified_base 6: mod_base = OTHER; note = 2'-fluoroguanosine
  modified_base 7: mod_base = um
  modified_base 8: mod_base = OTHER; note = 2'-O-methyladenosine
  modified_base 9: mod_base = OTHER; note = 2'-O-methyladenosine
  modified_base 10: mod_base = gm
  modified_base 11: mod_base = gm
  modified_base 12: mod_base = OTHER; note = 2'-fluorocytidine
  modified_base 13: mod_base = um
  modified_base 14: mod_base = OTHER; note = 2'-fluorouridine
  modified_base 15: mod_base = gm
  modified_base 16: mod_base = OTHER; note = 2'-fluorocytidine
  modified_base 17: mod_base = OTHER; note = 2'-O-methyladenosine
  modified_base 18: mod_base = OTHER; note = 2'-fluorouridine
  modified_base 19: mod_base = OTHER; note = 2'-O-methyladenosine
  modified_base 20: mod_base = OTHER; note = 2'-O-methyladenosine
  modified_base 20^21: mod_base = OTHER; note = phosphorothioate linkage
  modified_base 21: mod_base = cm
  source 1..21: mol_type = other RNA
tagttgtaaggcttgcataac

SEQ ID NO: 1214 - RNA, 21 nt, synthetic construct
  modified_base 1: mod_base = OTHER; note = 2'-O-methyladenosine
  modified_base 1^2: mod_base = OTHER; note = phosphorothioate linkage
  modified_base 2: mod_base = OTHER; note = 2'-fluorouridine
  modified_base 2^3: mod_base = OTHER; note = phosphorothioate linkage
  modified_base 3: mod_base = OTHER; note = 2'-O-methyladenosine
  modified_base 3^4: mod_base = OTHER; note = phosphorothioate linkage
  modified_base 4: mod_base = OTHER; note = 2'-fluoroadenosine
  modified_base 5: mod_base = gm
  modified_base 6: mod_base = OTHER; note = 2'-fluorocytidine
  modified_base 7: mod_base = um
  modified_base 8: mod_base = gm
  modified_base 9: mod_base = OTHER; note = 2'-O-methyladenosine
  modified_base 10: mod_base = OTHER; note = 2'-O-methyladenosine
  modified_base 11: mod_base = OTHER; note = 2'-O-methyladenosine
  modified_base 12: mod_base = OTHER; note = 2'-fluorocytidine
  modified_base 13: mod_base = gm
  modified_base 14: mod_base = OTHER; note = 2'-fluoroadenosine
  modified_base 15: mod_base = gm
  modified_base 16: mod_base = OTHER; note = 2'-fluoroadenosine
  modified_base 17: mod_base = OTHER; note = 2'-O-methyladenosine
  modified_base 18: mod_base = OTHER; note = 2'-fluoroadenosine
  modified_base 19: mod_base = gm
  modified_base 20: mod_base = cm
  modified_base 20^21: mod_base = OTHER; note = phosphorothioate linkage
  modified_base 21: mod_base = um
  source 1..21: mol_type = other RNA
ataagctgaaacgagaaagct

SEQ ID NO: 1215 - RNA, 21 nt, synthetic construct
  modified_base 1: mod_base = um
  modified_base 1^2: mod_base = OTHER; note = phosphorothioate linkage
  modified_base 2: mod_base = OTHER; note = 2'-fluoroadenosine
  modified_base 2^3: mod_base = OTHER; note = phosphorothioate linkage
  modified_base 3: mod_base = OTHER; note = 2'-O-methyladenosine
  modified_base 3^4: mod_base = OTHER; note = phosphorothioate linkage
  modified_base 4: mod_base = OTHER; note = 2'-fluorocytidine
  modified_base 5: mod_base = OTHER; note = 2'-O-methyladenosine
  modified_base 6: mod_base = OTHER; note = 2'-fluoroadenosine
  modified_base 7: mod_base = gm
  modified_base 8: mod_base = OTHER; note = 2'-O-methyladenosine
  modified_base 9: mod_base = gm
  modified_base 10: mod_base = um
  modified_base 11: mod_base = gm
  modified_base 12: mod_base = OTHER; note = 2'-fluoroguanosine
  modified_base 13: mod_base = cm
  modified_base 14: mod_base = OTHER; note = 2'-fluorouridine
  modified_base 15: mod_base = gm
  modified_base 16: mod_base = OTHER; note = 2'-fluorouridine
  modified_base 17: mod_base = um
  modified_base 18: mod_base = OTHER; note = 2'-fluorouridine
  modified_base 19: mod_base = cm
  modified_base 20: mod_base = gm
  modified_base 20^21: mod_base = OTHER; note = phosphorothioate linkage
  modified_base 21: mod_base = OTHER; note = 2'-O-methyladenosine
  source 1..21: mol_type = other RNA
taacaagagtggctgtttcga

SEQ ID NO: 1216 - RNA, 21 nt, synthetic construct
  modified_base 1: mod_base = um
  modified_base 1^2: mod_base = OTHER; note = phosphorothioate linkage
  modified_base 2: mod_base = OTHER; note = 2'-fluorocytidine
  modified_base 2^3: mod_base = OTHER; note = phosphorothioate linkage
  modified_base 3: mod_base = OTHER; note = 2'-O-methyladenosine
  modified_base 3^4: mod_base = OTHER; note = phosphorothioate linkage
  modified_base 4: mod_base = OTHER; note = 2'-fluoroadenosine
  modified_base 5: mod_base = gm
  modified_base 6: mod_base = OTHER; note = 2'-fluoroadenosine
  modified_base 7: mod_base = um
  modified_base 8: mod_base = cm
  modified_base 9: mod_base = cm
  modified_base 10: mod_base = OTHER; note = 2'-O-methyladenosine
  modified_base 11: mod_base = um
  modified_base 12: mod_base = OTHER; note = 2'-fluorouridine
  modified_base 13: mod_base = cm
  modified_base 14: mod_base = OTHER; note = 2'-fluorocytidine
  modified_base 15: mod_base = OTHER; note = 2'-O-methyladenosine
  modified_base 16: mod_base = OTHER; note = 2'-fluorocytidine
  modified_base 17: mod_base = gm
  modified_base 18: mod_base = OTHER; note = 2'-fluoroadenosine
  modified_base 19: mod_base = um
  modified_base 20: mod_base = um
  modified_base 20^21: mod_base = OTHER; note = phosphorothioate linkage
  modified_base 21: mod_base = cm
  source 1..21: mol_type = other RNA
tcaagatccattccacgattc

SEQ ID NO: 1217 - RNA, 21 nt, synthetic construct
  modified_base 1: mod_base = um
  modified_base 1^2: mod_base = OTHER; note = phosphorothioate linkage
  modified_base 2: mod_base = OTHER; note = 2'-fluorouridine
  modified_base 2^3: mod_base = OTHER; note = phosphorothioate linkage
  modified_base 3: mod_base = gm
  modified_base 3^4: mod_base = OTHER; note = phosphorothioate linkage
  modified_base 4: mod_base = OTHER; note = 2'-fluoroguanosine
  modified_base 5: mod_base = OTHER; note = 2'-O-methyladenosine
  modified_base 6: mod_base = OTHER; note = 2'-fluorouridine
  modified_base 7: mod_base = um
  modified_base 8: mod_base = cm
  modified_base 9: mod_base = cm
  modified_base 10: mod_base = um
  modified_base 11: mod_base = cm
  modified_base 12: mod_base = OTHER; note = 2'-fluorouridine
  modified_base 13: mod_base = um
  modified_base 14: mod_base = OTHER; note = 2'-fluorouridine
  modified_base 15: mod_base = cm
  modified_base 16: mod_base = OTHER; note = 2'-fluoroadenosine
  modified_base 17: mod_base = OTHER; note = 2'-O-methyladenosine
  modified_base 18: mod_base = OTHER; note = 2'-fluoroguanosine
  modified_base 19: mod_base = OTHER; note = 2'-O-methyladenosine
  modified_base 20: mod_base = um
  modified_base 20^21: mod_base = OTHER; note = phosphorothioate linkage
  modified_base 21: mod_base = cm
  source 1..21: mol_type = other RNA
ttggattcctctttcaagatc

SEQ ID NO: 1218 - RNA, 21 nt, synthetic construct
  modified_base 1: mod_base = OTHER; note = 2'-O-methyladenosine
  modified_base 1^2: mod_base = OTHER; note = phosphorothioate linkage
  modified_base 2: mod_base = OTHER; note = 2'-fluoroguanosine
  modified_base 2^3: mod_base = OTHER; note = phosphorothioate linkage
  modified_base 3: mod_base = gm
  modified_base 3^4: mod_base = OTHER; note = phosphorothioate linkage
  modified_base 4: mod_base = OTHER; note = 2'-fluorouridine
  modified_base 5: mod_base = OTHER; note = 2'-O-methyladenosine
  modified_base 6: mod_base = OTHER; note = 2'-fluorocytidine
  modified_base 7: mod_base = OTHER; note = 2'-O-methyladenosine
  modified_base 8: mod_base = gm
  modified_base 9: mod_base = OTHER; note = 2'-O-methyladenosine
  modified_base 10: mod_base = um
  modified_base 11: mod_base = gm
  modified_base 12: mod_base = OTHER; note = 2'-fluorocytidine
  modified_base 13: mod_base = OTHER; note = 2'-O-methyladenosine
  modified_base 14: mod_base = OTHER; note = 2'-fluoroadenosine
  modified_base 15: mod_base = um
  modified_base 16: mod_base = OTHER; note = 2'-fluorouridine
  modified_base 17: mod_base = gm
  modified_base 18: mod_base = OTHER; note = 2'-fluorouridine
  modified_base 19: mod_base = cm
  modified_base 20: mod_base = OTHER; note = 2'-O-methyladenosine
  modified_base 20^21: mod_base = OTHER; note = phosphorothioate linkage
  modified_base 21: mod_base = cm
  source 1..21: mol_type = other RNA
aggtacagatgcaattgtcac

SEQ ID NO: 1219 - RNA, 21 nt, synthetic construct
  modified_base 1: mod_base = um
  modified_base 1^2: mod_base = OTHER; note = phosphorothioate linkage
  modified_base 2: mod_base = OTHER; note = 2'-fluorocytidine
  modified_base 2^3: mod_base = OTHER; note = phosphorothioate linkage
  modified_base 3: mod_base = gm
  modified_base 3^4: mod_base = OTHER; note = phosphorothioate linkage
  modified_base 4: mod_base = OTHER; note = 2'-fluoroadenosine
  modified_base 5: mod_base = OTHER; note = 2'-O-methyladenosine
  modified_base 6: mod_base = OTHER; note = 2'-fluoroguanosine
  modified_base 7: mod_base = um
  modified_base 8: mod_base = OTHER; note = 2'-O-methyladenosine
  modified_base 9: mod_base = gm
  modified_base 10: mod_base = gm
  modified_base 11: mod_base = um
  modified_base 12: mod_base = OTHER; note = 2'-fluoroadenosine
  modified_base 13: mod_base = cm
  modified_base 14: mod_base = OTHER; note = 2'-fluoroadenosine
  modified_base 15: mod_base = gm
  modified_base 16: mod_base = OTHER; note = 2'-fluoroadenosine
  modified_base 17: mod_base = um
  modified_base 18: mod_base = OTHER; note = 2'-fluoroguanosine
  modified_base 19: mod_base = cm
  modified_base 20: mod_base = OTHER; note = 2'-O-methyladenosine
  modified_base 20^21: mod_base = OTHER; note = phosphorothioate linkage
  modified_base 21: mod_base = cm
  source 1..21: mol_type = other RNA
tcgaagtaggtacagatgcac

SEQ ID NO: 1220 - RNA, 21 nt, synthetic construct
  modified_base 1: mod_base = OTHER; note = 2'-O-methyladenosine
  modified_base 1^2: mod_base = OTHER; note = phosphorothioate linkage
  modified_base 2: mod_base = OTHER; note = 2'-fluorouridine
  modified_base 2^3: mod_base = OTHER; note = phosphorothioate linkage
  modified_base 3: mod_base = gm
  modified_base 3^4: mod_base = OTHER; note = phosphorothioate linkage
  modified_base 4: mod_base = OTHER; note = 2'-fluoroadenosine
  modified_base 5: mod_base = gm
  modified_base 6: mod_base = OTHER; note = 2'-fluorocytidine
  modified_base 7: mod_base = OTHER; note = 2'-O-methyladenosine
  modified_base 8: mod_base = um
  modified_base 9: mod_base = gm
  modified_base 10: mod_base = OTHER; note = 2'-O-methyladenosine
  modified_base 11: mod_base = OTHER; note = 2'-O-methyladenosine
  modified_base 12: mod_base = OTHER; note = 2'-fluorocytidine
  modified_base 13: mod_base = cm
  modified_base 14: mod_base = OTHER; note = 2'-fluoroadenosine
  modified_base 15: mod_base = gm
  modified_base 16: mod_base = OTHER; note = 2'-fluorouridine
  modified_base 17: mod_base = cm
  modified_base 18: mod_base = OTHER; note = 2'-fluorouridine
  modified_base 19: mod_base = cm
  modified_base 20: mod_base = gm
  modified_base 20^21: mod_base = OTHER; note = phosphorothioate linkage
  modified_base 21: mod_base = um
  source 1..21: mol_type = other RNA
atgagcatgaaccagtctcgt

SEQ ID NO: 1221 - RNA, 21 nt, synthetic construct
  modified_base 1: mod_base = OTHER; note = 2'-O-methyladenosine
  modified_base 1^2: mod_base = OTHER; note = phosphorothioate linkage
  modified_base 2: mod_base = OTHER; note = 2'-fluoroadenosine
  modified_base 2^3: mod_base = OTHER; note = phosphorothioate linkage
  modified_base 3: mod_base = OTHER; note = 2'-O-methyladenosine
  modified_base 3^4: mod_base = OTHER; note = phosphorothioate linkage
  modified_base 4: mod_base = OTHER; note = 2'-fluoroguanosine
  modified_base 5: mod_base = OTHER; note = 2'-O-methyladenosine
  modified_base 6: mod_base = OTHER; note = 2'-fluorouridine
  modified_base 7: mod_base = um
  modified_base 8: mod_base = OTHER; note = 2'-O-methyladenosine
  modified_base 9: mod_base = cm
  modified_base 10: mod_base = OTHER; note = 2'-O-methyladenosine
  modified_base 11: mod_base = cm
  modified_base 12: mod_base = OTHER; note = 2'-fluorouridine
  modified_base 13: mod_base = gm
  modified_base 14: mod_base = OTHER; note = 2'-fluoroadenosine
  modified_base 15: mod_base = OTHER; note = 2'-O-methyladenosine
  modified_base 16: mod_base = OTHER; note = 2'-fluoroguanosine
  modified_base 17: mod_base = um
  modified_base 18: mod_base = OTHER; note = 2'-fluorouridine
  modified_base 19: mod_base = cm
  modified_base 20: mod_base = gm
  modified_base 20^21: mod_base = OTHER; note = phosphorothioate linkage
  modified_base 21: mod_base = cm
  source 1..21: mol_type = other RNA
aaagattacactgaagttcgc

SEQ ID NO: 1222 - RNA, 21 nt, synthetic construct
  modified_base 1: mod_base = um
  modified_base 1^2: mod_base = OTHER; note = phosphorothioate linkage
  modified_base 2: mod_base = OTHER; note = 2'-fluorouridine
  modified_base 2^3: mod_base = OTHER; note = phosphorothioate linkage
  modified_base 3: mod_base = OTHER; note = 2'-O-methyladenosine
  modified_base 3^4: mod_base = OTHER; note = phosphorothioate linkage
  modified_base 4: mod_base = OTHER; note = 2'-fluorouridine
  modified_base 5: mod_base = cm
  modified_base 6: mod_base = OTHER; note = 2'-fluoroadenosine
  modified_base 7: mod_base = OTHER; note = 2'-O-methyladenosine
  modified_base 8: mod_base = gm
  modified_base 9: mod_base = gm
  modified_base 10: mod_base = um
  modified_base 11: mod_base = cm
  modified_base 12: mod_base = OTHER; note = 2'-fluorouridine
  modified_base 13: mod_base = cm
  modified_base 14: mod_base = OTHER; note = 2'-fluorouridine
  modified_base 15: mod_base = OTHER; note = 2'-O-methyladenosine
  modified_base 16: mod_base = OTHER; note = 2'-fluoroadenosine
  modified_base 17: mod_base = um
  modified_base 18: mod_base = OTHER; note = 2'-fluorocytidine
  modified_base 19: mod_base = gm
  modified_base 20: mod_base = gm
  modified_base 20^21: mod_base = OTHER; note = phosphorothioate linkage
  modified_base 21: mod_base = um
  source 1..21: mol_type = other RNA
ttatcaaggtctctaatcggt

SEQ ID NO: 1223 - RNA, 21 nt, synthetic construct
  modified_base 1: mod_base = OTHER; note = 2'-O-methyladenosine
  modified_base 1^2: mod_base = OTHER; note = phosphorothioate linkage
  modified_base 2: mod_base = OTHER; note = 2'-fluorocytidine
  modified_base 2^3: mod_base = OTHER; note = phosphorothioate linkage
  modified_base 3: mod_base = um
  modified_base 3^4: mod_base = OTHER; note = phosphorothioate linkage
  modified_base 4: mod_base = OTHER; note = 2'-fluorocytidine
  modified_base 5: mod_base = gm
  modified_base 6: mod_base = OTHER; note = 2'-fluoroadenosine
  modified_base 7: mod_base = OTHER; note = 2'-O-methyladenosine
  modified_base 8: mod_base = cm
  modified_base 9: mod_base = cm
  modified_base 10: mod_base = gm
  modified_base 11: mod_base = um
  modified_base 12: mod_base = OTHER; note = 2'-fluoroguanosine
  modified_base 13: mod_base = um
  modified_base 14: mod_base = OTHER; note = 2'-fluorouridine
  modified_base 15: mod_base = OTHER; note = 2'-O-methyladenosine
  modified_base 16: mod_base = OTHER; note = 2'-fluorocytidine
  modified_base 17: mod_base = cm
  modified_base 18: mod_base = OTHER; note = 2'-fluoroadenosine
  modified_base 19: mod_base = um
  modified_base 20: mod_base = um
  modified_base 20^21: mod_base = OTHER; note = phosphorothioate linkage
  modified_base 21: mod_base = cm
  source 1..21: mol_type = other RNA
actcgaaccgtgttaccattc

SEQ ID NO: 1224 - RNA, 21 nt, synthetic construct
  modified_base 1: mod_base = um
  modified_base 1^2: mod_base = OTHER; note = phosphorothioate linkage
  modified_base 2: mod_base = OTHER; note = 2'-fluoroadenosine
  modified_base 2^3: mod_base = OTHER; note = phosphorothioate linkage
  modified_base 3: mod_base = gm
  modified_base 3^4: mod_base = OTHER; note = phosphorothioate linkage
  modified_base 4: mod_base = OTHER; note = 2'-fluorouridine
  modified_base 5: mod_base = gm
  modified_base 6: mod_base = OTHER; note = 2'-fluoroadenosine
  modified_base 7: mod_base = OTHER; note = 2'-O-methyladenosine
  modified_base 8: mod_base = gm
  modified_base 9: mod_base = gm
  modified_base 10: mod_base = um
  modified_base 11: mod_base = cm
  modified_base 12: mod_base = OTHER; note = 2'-fluorouridine
  modified_base 13: mod_base = cm
  modified_base 14: mod_base = OTHER; note = 2'-fluorocytidine
  modified_base 15: mod_base = cm
  modified_base 16: mod_base = OTHER; note = 2'-fluoroadenosine
  modified_base 17: mod_base = um
  modified_base 18: mod_base = OTHER; note = 2'-fluorouridine
  modified_base 19: mod_base = cm
  modified_base 20: mod_base = um
  modified_base 20^21: mod_base = OTHER; note = phosphorothioate linkage
  modified_base 21: mod_base = cm
  source 1..21: mol_type = other RNA
tagtgaaggtctcccattctc

SEQ ID NO: 1225 - RNA, 21 nt, synthetic construct
  modified_base 1: mod_base = um
  modified_base 1^2: mod_base = OTHER; note = phosphorothioate linkage
  modified_base 2: mod_base = OTHER; note = 2'-fluorouridine
  modified_base 2^3: mod_base = OTHER; note = phosphorothioate linkage
  modified_base 3: mod_base = cm
  modified_base 3^4: mod_base = OTHER; note = phosphorothioate linkage
  modified_base 4: mod_base = OTHER; note = 2'-fluoroguanosine
  modified_base 5: mod_base = OTHER; note = 2'-O-methyladenosine
  modified_base 6: mod_base = OTHER; note = 2'-fluoroadenosine
  modified_base 7: mod_base = OTHER; note = 2'-O-methyladenosine
  modified_base 8: mod_base = cm
  modified_base 9: mod_base = um
  modified_base 10: mod_base = OTHER; note = 2'-O-methyladenosine
  modified_base 11: mod_base = um
  modified_base 12: mod_base = OTHER; note = 2'-fluorouridine
  modified_base 13: mod_base = cm
  modified_base 14: mod_base = OTHER; note = 2'-fluorouridine
  modified_base 15: mod_base = cm
  modified_base 16: mod_base = OTHER; note = 2'-fluorouridine
  modified_base 17: mod_base = gm
  modified_base 18: mod_base = OTHER; note = 2'-fluorouridine
  modified_base 19: mod_base = cm
  modified_base 20: mod_base = gm
  modified_base 20^21: mod_base = OTHER; note = phosphorothioate linkage
  modified_base 21: mod_base = cm
  source 1..21: mol_type = other RNA
ttcgaaactattctctgtcgc

SEQ ID NO: 1226 - RNA, 21 nt, synthetic construct
  modified_base 1: mod_base = OTHER; note = 2'-O-methyladenosine
  modified_base 1^2: mod_base = OTHER; note = phosphorothioate linkage
  modified_base 2: mod_base = OTHER; note = 2'-fluoroadenosine
  modified_base 2^3: mod_base = OTHER; note = phosphorothioate linkage
  modified_base 3: mod_base = cm
  modified_base 3^4: mod_base = OTHER; note = phosphorothioate linkage
  modified_base 4: mod_base = OTHER; note = 2'-fluoroguanosine
  modified_base 5: mod_base = OTHER; note = 2'-O-methyladenosine
  modified_base 6: mod_base = OTHER; note = 2'-fluoroguanosine
  modified_base 7: mod_base = OTHER; note = 2'-O-methyladenosine
  modified_base 8: mod_base = OTHER; note = 2'-O-methyladenosine
  modified_base 9: mod_base = OTHER; note = 2'-O-methyladenosine
  modified_base 10: mod_base = gm
  modified_base 11: mod_base = cm
  modified_base 12: mod_base = OTHER; note = 2'-fluorouridine
  modified_base 13: mod_base = cm
  modified_base 14: mod_base = OTHER; note = 2'-fluorouridine
  modified_base 15: mod_base = um
  modified_base 16: mod_base = OTHER; note = 2'-fluoroadenosine
  modified_base 17: mod_base = um
  modified_base 18: mod_base = OTHER; note = 2'-fluorocytidine
  modified_base 19: mod_base = um
  modified_base 20: mod_base = cm
  modified_base 20^21: mod_base = OTHER; note = phosphorothioate linkage
  modified_base 21: mod_base = cm
  source 1..21: mol_type = other RNA
aacgagaaagctcttatctcc

SEQ ID NO: 1227 - RNA, 21 nt, synthetic construct
  modified_base 1: mod_base = um
  modified_base 1^2: mod_base = OTHER; note = phosphorothioate linkage
  modified_base 2: mod_base = OTHER; note = 2'-fluorouridine
  modified_base 2^3: mod_base = OTHER; note = phosphorothioate linkage
  modified_base 3: mod_base = cm
  modified_base 3^4: mod_base = OTHER; note = phosphorothioate linkage
  modified_base 4: mod_base = OTHER; note = 2'-fluorocytidine
  modified_base 5: mod_base = OTHER; note = 2'-O-methyladenosine
  modified_base 6: mod_base = OTHER; note = 2'-fluoroadenosine
  modified_base 7: mod_base = gm
  modified_base 8: mod_base = cm
  modified_base 9: mod_base = gm
  modified_base 10: mod_base = OTHER; note = 2'-O-methyladenosine
  modified_base 11: mod_base = OTHER; note = 2'-O-methyladenosine
  modified_base 12: mod_base = OTHER; note = 2'-fluorouridine
  modified_base 13: mod_base = cm
  modified_base 14: mod_base = OTHER; note = 2'-fluorouridine
  modified_base 15: mod_base = cm
  modified_base 16: mod_base = OTHER; note = 2'-fluorouridine
  modified_base 17: mod_base = gm
  modified_base 18: mod_base = OTHER; note = 2'-fluorouridine
  modified_base 19: mod_base = OTHER; note = 2'-O-methyladenosine
  modified_base 20: mod_base = um
  modified_base 20^21: mod_base = OTHER; note = phosphorothioate linkage
  modified_base 21: mod_base = gm
  source 1..21: mol_type = other RNA
ttccaagcgaatctctgtatg

SEQ ID NO: 1228 - RNA, 21 nt, synthetic construct
  modified_base 1: mod_base = OTHER; note = 5'-cyclopropyl phosphonate-2'-O-methyluridine
  modified_base 1^2: mod_base = OTHER; note = phosphorothioate linkage
  modified_base 2: mod_base = OTHER; note = 2'-fluorouridine
  modified_base 2^3: mod_base = OTHER; note = phosphorothioate linkage
  modified_base 3: mod_base = cm
  modified_base 3^4: mod_base = OTHER; note = phosphorothioate linkage
  modified_base 4: mod_base = OTHER; note = 2'-fluorocytidine
  modified_base 5: mod_base = OTHER; note = 2'-O-methyladenosine
  modified_base 6: mod_base = OTHER; note = 2'-fluoroadenosine
  modified_base 7: mod_base = gm
  modified_base 8: mod_base = cm
  modified_base 9: mod_base = gm
  modified_base 10: mod_base = OTHER; note = 2'-O-methyladenosine
  modified_base 11: mod_base = OTHER; note = 2'-O-methyladenosine
  modified_base 12: mod_base = OTHER; note = 2'-fluorouridine
  modified_base 13: mod_base = cm
  modified_base 14: mod_base = OTHER; note = 2'-fluorouridine
  modified_base 15: mod_base = cm
  modified_base 16: mod_base = OTHER; note = 2'-fluorouridine
  modified_base 17: mod_base = gm
  modified_base 18: mod_base = OTHER; note = 2'-fluorouridine
  modified_base 19: mod_base = OTHER; note = 2'-O-methyladenosine
  modified_base 20: mod_base = um
  modified_base 20^21: mod_base = OTHER; note = phosphorothioate linkage
  modified_base 21: mod_base = cm
  source 1..21: mol_type = other RNA
ttccaagcgaatctctgtatc

SEQ ID NO: 1229 - RNA, 21 nt, synthetic construct
  modified_base 1: mod_base = OTHER; note = 5'-cyclopropyl phosphonate-2'-O-methyluridine
  modified_base 1^2: mod_base = OTHER; note = phosphorothioate linkage
  modified_base 2: mod_base = OTHER; note = 2'-fluorouridine
  modified_base 2^3: mod_base = OTHER; note = phosphorothioate linkage
  modified_base 3: mod_base = cm
  modified_base 4: mod_base = OTHER; note = 2'-fluorocytidine
  modified_base 5: mod_base = OTHER; note = 2'-O-methyladenosine
  modified_base 6: mod_base = OTHER; note = 2'-fluoroadenosine
  modified_base 7: mod_base = gm
  modified_base 8: mod_base = cm
  modified_base 9: mod_base = gm
  modified_base 10: mod_base = OTHER; note = 2'-O-methyladenosine
  modified_base 11: mod_base = OTHER; note = 2'-O-methyladenosine
  modified_base 12: mod_base = OTHER; note = 2'-fluorouridine
  modified_base 13: mod_base = cm
  modified_base 14: mod_base = OTHER; note = 2'-fluorouridine
  modified_base 15: mod_base = cm
  modified_base 16: mod_base = OTHER; note = 2'-fluorouridine
  modified_base 17: mod_base = gm
  modified_base 18: mod_base = OTHER; note = 2'-fluorouridine
  modified_base 19: mod_base = OTHER; note = 2'-O-methyladenosine
  modified_base 19^20: mod_base = OTHER; note = phosphorothioate linkage
  modified_base 20: mod_base = um
  modified_base 20^21: mod_base = OTHER; note = phosphorothioate linkage
  modified_base 21: mod_base = cm
  source 1..21: mol_type = other RNA
ttccaagcgaatctctgtatc

SEQ ID NO: 1230 - RNA, 21 nt, synthetic construct
  modified_base 1: mod_base = um
  modified_base 1^2: mod_base = OTHER; note = phosphorothioate linkage
  modified_base 2: mod_base = OTHER; note = 2'-fluorouridine
  modified_base 2^3: mod_base = OTHER; note = phosphorothioate linkage
  modified_base 3: mod_base = OTHER; note = 2'-fluorocytidine
  modified_base 3^4: mod_base = OTHER; note = phosphorothioate linkage
  modified_base 4: mod_base = cm
  modified_base 5: mod_base = OTHER; note = 2'-O-methyladenosine
  modified_base 6: mod_base = OTHER; note = 2'-O-methyladenosine
  modified_base 7: mod_base = gm
  modified_base 8: mod_base = cm
  modified_base 9: mod_base = gm
  modified_base 10: mod_base = OTHER; note = 2'-O-methyladenosine
  modified_base 11: mod_base = OTHER; note = 2'-O-methyladenosine
  modified_base 12: mod_base = OTHER; note = 2'-fluorouridine
  modified_base 13: mod_base = cm
  modified_base 14: mod_base = OTHER; note = 2'-fluorouridine
  modified_base 15: mod_base = cm
  modified_base 16: mod_base = OTHER; note = 2'-fluorouridine
  modified_base 17: mod_base = gm
  modified_base 18: mod_base = um
  modified_base 19: mod_base = OTHER; note = 2'-O-methyladenosine
  modified_base 20: mod_base = um
  modified_base 20^21: mod_base = OTHER; note = phosphorothioate linkage
  modified_base 21: mod_base = cm
  source 1..21: mol_type = other RNA
ttccaagcgaatctctgtatc

SEQ ID NO: 1231 - RNA, 21 nt, synthetic construct
  modified_base 1: mod_base = um
  modified_base 1^2: mod_base = OTHER; note = phosphorothioate linkage
  modified_base 2: mod_base = OTHER; note = 2'-fluorouridine
  modified_base 2^3: mod_base = OTHER; note = phosphorothioate linkage
  modified_base 3: mod_base = cm
  modified_base 3^4: mod_base = OTHER; note = phosphorothioate linkage
  modified_base 4: mod_base = OTHER; note = 2'-fluorocytidine
  modified_base 5: mod_base = OTHER; note = 2'-O-methyladenosine
  modified_base 6: mod_base = OTHER; note = 2'-O-methyladenosine
  modified_base 7: mod_base = gm
  modified_base 8: mod_base = cm
  modified_base 9: mod_base = gm
  modified_base 10: mod_base = OTHER; note = 2'-O-methyladenosine
  modified_base 11: mod_base = OTHER; note = 2'-O-methyladenosine
  modified_base 12: mod_base = OTHER; note = 2'-fluorouridine
  modified_base 13: mod_base = cm
  modified_base 14: mod_base = OTHER; note = 2'-fluorouridine
  modified_base 15: mod_base = cm
  modified_base 16: mod_base = OTHER; note = 2'-fluorouridine
  modified_base 17: mod_base = gm
  modified_base 18: mod_base = um
  modified_base 19: mod_base = OTHER; note = 2'-O-methyladenosine
  modified_base 20: mod_base = um
  modified_base 20^21: mod_base = OTHER; note = phosphorothioate linkage
  modified_base 21: mod_base = cm
  source 1..21: mol_type = other RNA
ttccaagcgaatctctgtatc

SEQ ID NO: 1232 - RNA, 21 nt, synthetic construct
  modified_base 1: mod_base = um
  modified_base 1^2: mod_base = OTHER; note = phosphorothioate linkage
  modified_base 2: mod_base = OTHER; note = 2'-fluoroguanosine
  modified_base 2^3: mod_base = OTHER; note = phosphorothioate linkage
  modified_base 3: mod_base = cm
  modified_base 3^4: mod_base = OTHER; note = phosphorothioate linkage
  modified_base 4: mod_base = OTHER; note = 2'-fluoroadenosine
  modified_base 5: mod_base = um
  modified_base 6: mod_base = um
  modified_base 7: mod_base = um
  modified_base 8: mod_base = um
  modified_base 9: mod_base = um
  modified_base 10: mod_base = gm
  modified_base 11: mod_base = OTHER; note = 2'-O-methyladenosine
  modified_base 12: mod_base = OTHER; note = 2'-fluorocytidine
  modified_base 13: mod_base = OTHER; note = 2'-O-methyladenosine
  modified_base 14: mod_base = OTHER; note = 2'-fluorouridine
  modified_base 15: mod_base = cm
  modified_base 16: mod_base = OTHER; note = 2'-fluorocytidine
  modified_base 17: mod_base = um
  modified_base 18: mod_base = cm
  modified_base 19: mod_base = OTHER; note = 2'-O-methyladenosine
  modified_base 20: mod_base = um
  modified_base 20^21: mod_base = OTHER; note = phosphorothioate linkage
  modified_base 21: mod_base = cm
  source 1..21: mol_type = other RNA
tgcatttttgacatcctcatc

SEQ ID NO: 1233 - RNA, 21 nt, synthetic construct
  modified_base 1: mod_base = um
  modified_base 1^2: mod_base = OTHER; note = phosphorothioate linkage
  modified_base 2: mod_base = OTHER; note = 2'-fluoroguanosine
  modified_base 2^3: mod_base = OTHER; note = phosphorothioate linkage
  modified_base 3: mod_base = cm
  modified_base 3^4: mod_base = OTHER; note = phosphorothioate linkage
  modified_base 4: mod_base = OTHER; note = 2'-O-methyladenosine
  modified_base 5: mod_base = um
  modified_base 6: mod_base = um
  modified_base 7: mod_base = OTHER; note = 2'-fluorouridine
  modified_base 8: mod_base = um
  modified_base 9: mod_base = um
  modified_base 10: mod_base = gm
  modified_base 11: mod_base = OTHER; note = 2'-O-methyladenosine
  modified_base 12: mod_base = OTHER; note = 2'-fluorocytidine
  modified_base 13: mod_base = OTHER; note = 2'-O-methyladenosine
  modified_base 14: mod_base = OTHER; note = 2'-fluorouridine
  modified_base 15: mod_base = cm
  modified_base 16: mod_base = OTHER; note = 2'-fluorocytidine
  modified_base 17: mod_base = um
  modified_base 18: mod_base = cm
  modified_base 19: mod_base = OTHER; note = 2'-O-methyladenosine
  modified_base 20: mod_base = um
  modified_base 20^21: mod_base = OTHER; note = phosphorothioate linkage
  modified_base 21: mod_base = cm
  source 1..21: mol_type = other RNA
tgcatttttgacatcctcatc

SEQ ID NO: 1234 - RNA, 21 nt, synthetic construct
  modified_base 1: mod_base = OTHER; note = 5'-cyclopropyl phosphonate-2'-O-methyluridine
  modified_base 1^2: mod_base = OTHER; note = phosphorothioate linkage
  modified_base 2: mod_base = OTHER; note = 2'-fluoroguanosine
  modified_base 2^3: mod_base = OTHER; note = phosphorothioate linkage
  modified_base 3: mod_base = cm
  modified_base 3^4: mod_base = OTHER; note = phosphorothioate linkage
  modified_base 4: mod_base = OTHER; note = 2'-O-methyladenosine
  modified_base 5: mod_base = um
  modified_base 6: mod_base = um
  modified_base 7: mod_base = OTHER; note = 2'-fluorouridine
  modified_base 8: mod_base = um
  modified_base 9: mod_base = um
  modified_base 10: mod_base = gm
  modified_base 11: mod_base = OTHER; note = 2'-O-methyladenosine
  modified_base 12: mod_base = OTHER; note = 2'-fluorocytidine
  modified_base 13: mod_base = OTHER; note = 2'-O-methyladenosine
  modified_base 14: mod_base = OTHER; note = 2'-fluorouridine
  modified_base 15: mod_base = cm
  modified_base 16: mod_base = OTHER; note = 2'-fluorocytidine
  modified_base 17: mod_base = um
  modified_base 18: mod_base = cm
  modified_base 19: mod_base = OTHER; note = 2'-O-methyladenosine
  modified_base 20: mod_base = um
  modified_base 20^21: mod_base = OTHER; note = phosphorothioate linkage
  modified_base 21: mod_base = cm
  source 1..21: mol_type = other RNA
tgcatttttgacatcctcatc

SEQ ID NO: 1235 - RNA, 21 nt, synthetic construct
  modified_base 1: mod_base = um
  modified_base 1^2: mod_base = OTHER; note = phosphorothioate linkage
  modified_base 2: mod_base = OTHER; note = 2'-fluorouridine
  modified_base 2^3: mod_base = OTHER; note = phosphorothioate linkage
  modified_base 3: mod_base = gm
  modified_base 3^4: mod_base = OTHER; note = phosphorothioate linkage
  modified_base 4: mod_base = OTHER; note = 2'-fluorouridine
  modified_base 5: mod_base = um
  modified_base 6: mod_base = OTHER; note = 2'-O-methyladenosine
  modified_base 7: mod_base = cm
  modified_base 8: mod_base = cm
  modified_base 9: mod_base = OTHER; note = 2'-O-methyladenosine
  modified_base 10: mod_base = um
  modified_base 11: mod_base = um
  modified_base 12: mod_base = OTHER; note = 2'-fluorocytidine
  modified_base 13: mod_base = cm
  modified_base 14: mod_base = OTHER; note = 2'-fluoroadenosine
  modified_base 15: mod_base = um
  modified_base 16: mod_base = OTHER; note = 2'-fluorouridine
  modified_base 17: mod_base = cm
  modified_base 18: mod_base = OTHER; note = 2'-O-methyladenosine
  modified_base 19: mod_base = OTHER; note = 2'-O-methyladenosine
  modified_base 20: mod_base = gm
  modified_base 20^21: mod_base = OTHER; note = phosphorothioate linkage
  modified_base 21: mod_base = cm
  source 1..21: mol_type = other RNA
ttgttaccattccattcaagc

SEQ ID NO: 1236 - RNA, 21 nt, synthetic construct
  modified_base 1: mod_base = um
  modified_base 1^2: mod_base = OTHER; note = phosphorothioate linkage
  modified_base 2: mod_base = OTHER; note = 2'-fluorouridine
  modified_base 2^3: mod_base = OTHER; note = phosphorothioate linkage
  modified_base 3: mod_base = gm
  modified_base 3^4: mod_base = OTHER; note = phosphorothioate linkage
  modified_base 4: mod_base = um
  modified_base 5: mod_base = um
  modified_base 6: mod_base = OTHER; note = 2'-O-methyladenosine
  modified_base 7: mod_base = OTHER; note = 2'-fluorocytidine
  modified_base 8: mod_base = cm
  modified_base 9: mod_base = OTHER; note = 2'-O-methyladenosine
  modified_base 10: mod_base = um
  modified_base 11: mod_base = um
  modified_base 12: mod_base = OTHER; note = 2'-fluorocytidine
  modified_base 13: mod_base = cm
  modified_base 14: mod_base = OTHER; note = 2'-fluoroadenosine
  modified_base 15: mod_base = um
  modified_base 16: mod_base = OTHER; note = 2'-fluorouridine
  modified_base 17: mod_base = cm
  modified_base 18: mod_base = OTHER; note = 2'-O-methyladenosine
  modified_base 19: mod_base = OTHER; note = 2'-O-methyladenosine
  modified_base 20: mod_base = gm
  modified_base 20^21: mod_base = OTHER; note = phosphorothioate linkage
  modified_base 21: mod_base = cm
  source 1..21: mol_type = other RNA
ttgttaccattccattcaagc

SEQ ID NO: 1237 - RNA, 21 nt, synthetic construct
  modified_base 1: mod_base = um
  modified_base 1^2: mod_base = OTHER; note = phosphorothioate linkage
  modified_base 2: mod_base = OTHER; note = 2'-fluorouridine
  modified_base 2^3: mod_base = OTHER; note = phosphorothioate linkage
  modified_base 3: mod_base = cm
  modified_base 3^4: mod_base = OTHER; note = phosphorothioate linkage
  modified_base 4: mod_base = gm
  modified_base 5: mod_base = OTHER; note = 2'-fluoroadenosine
  modified_base 6: mod_base = OTHER; note = 2'-O-methyladenosine
  modified_base 7: mod_base = OTHER; note = 2'-O-methyladenosine
  modified_base 8: mod_base = cm
  modified_base 9: mod_base = um
  modified_base 10: mod_base = OTHER; note = 2'-O-methyladenosine
  modified_base 11: mod_base = um
  modified_base 12: mod_base = OTHER; note = 2'-fluorouridine
  modified_base 13: mod_base = cm
  modified_base 14: mod_base = OTHER; note = 2'-fluorouridine
  modified_base 15: mod_base = cm
  modified_base 16: mod_base = OTHER; note = 2'-fluorouridine
  modified_base 17: mod_base = gm
  modified_base 18: mod_base = um
  modified_base 19: mod_base = cm
  modified_base 20: mod_base = gm
  modified_base 20^21: mod_base = OTHER; note = phosphorothioate linkage
  modified_base 21: mod_base = cm
  source 1..21: mol_type = other RNA
ttcgaaactattctctgtcgc

SEQ ID NO: 1238 - RNA, 21 nt, synthetic construct
  modified_base 1: mod_base = um
  modified_base 1^2: mod_base = OTHER; note = phosphorothioate linkage
  modified_base 2: mod_base = OTHER; note = 2'-fluorouridine
  modified_base 2^3: mod_base = OTHER; note = phosphorothioate linkage
  modified_base 3: mod_base = cm
  modified_base 3^4: mod_base = OTHER; note = phosphorothioate linkage
  modified_base 4: mod_base = gm
  modified_base 5: mod_base = OTHER; note = 2'-O-methyladenosine
  modified_base 6: mod_base = OTHER; note = 2'-O-methyladenosine
  modified_base 7: mod_base = OTHER; note = 2'-fluoroadenosine
  modified_base 8: mod_base = cm
  modified_base 9: mod_base = um
  modified_base 10: mod_base = OTHER; note = 2'-O-methyladenosine
  modified_base 11: mod_base = um
  modified_base 12: mod_base = OTHER; note = 2'-fluorouridine
  modified_base 13: mod_base = cm
  modified_base 14: mod_base = OTHER; note = 2'-fluorouridine
  modified_base 15: mod_base = cm
  modified_base 16: mod_base = OTHER; note = 2'-fluorouridine
  modified_base 17: mod_base = gm
  modified_base 18: mod_base = um
  modified_base 19: mod_base = cm
  modified_base 20: mod_base = gm
  modified_base 20^21: mod_base = OTHER; note = phosphorothioate linkage
  modified_base 21: mod_base = cm
  source 1..21: mol_type = other RNA
ttcgaaactattctctgtcgc

SEQ ID NO: 1239 - RNA, 21 nt, synthetic construct
  modified_base 1: mod_base = OTHER; note = 2'-O-methyladenosine
  modified_base 1^2: mod_base = OTHER; note = phosphorothioate linkage
  modified_base 2: mod_base = OTHER; note = 2'-fluorouridine
  modified_base 2^3: mod_base = OTHER; note = phosphorothioate linkage
  modified_base 3: mod_base = OTHER; note = 2'-O-methyladenosine
  modified_base 3^4: mod_base = OTHER; note = phosphorothioate linkage
  modified_base 4: mod_base = OTHER; note = 2'-fluoroadenosine
  modified_base 5: mod_base = gm
  modified_base 6: mod_base = OTHER; note = 2'-fluorocytidine
  modified_base 7: mod_base = um
  modified_base 8: mod_base = gm
  modified_base 9: mod_base = OTHER; note = 2'-O-methyladenosine
  modified_base 10: mod_base = OTHER; note = 2'-O-methyladenosine
  modified_base 11: mod_base = OTHER; note = 2'-O-methyladenosine
  modified_base 12: mod_base = OTHER; note = 2'-fluorocytidine
  modified_base 13: mod_base = gm
  modified_base 14: mod_base = OTHER; note = 2'-fluoroadenosine
  modified_base 15: mod_base = gm
  modified_base 16: mod_base = OTHER; note = 2'-fluoroadenosine
  modified_base 17: mod_base = OTHER; note = 2'-O-methyladenosine
  modified_base 18: mod_base = OTHER; note = 2'-fluoroadenosine
  modified_base 19: mod_base = gm
  modified_base 20: mod_base = cm
  modified_base 20^21: mod_base = OTHER; note = phosphorothioate linkage
  modified_base 21: mod_base = cm
  source 1..21: mol_type = other RNA
ataagctgaaacgagaaagcc

SEQ ID NO: 1240 - RNA, 21 nt, synthetic construct
  modified_base 1: mod_base = OTHER; note = 2'-O-methyladenosine
  modified_base 1^2: mod_base = OTHER; note = phosphorothioate linkage
  modified_base 2: mod_base = OTHER; note = 2'-fluorouridine
  modified_base 2^3: mod_base = OTHER; note = phosphorothioate linkage
  modified_base 3: mod_base = OTHER; note = 2'-fluoroadenosine
  modified_base 3^4: mod_base = OTHER; note = phosphorothioate linkage
  modified_base 4: mod_base = OTHER; note = 2'-O-methyladenosine
  modified_base 5: mod_base = gm
  modified_base 6: mod_base = cm
  modified_base 7: mod_base = um
  modified_base 8: mod_base = gm
  modified_base 9: mod_base = OTHER; note = 2'-O-methyladenosine
  modified_base 10: mod_base = OTHER; note = 2'-O-methyladenosine
  modified_base 11: mod_base = OTHER; note = 2'-O-methyladenosine
  modified_base 12: mod_base = OTHER; note = 2'-fluorocytidine
  modified_base 13: mod_base = gm
  modified_base 14: mod_base = OTHER; note = 2'-fluoroadenosine
  modified_base 15: mod_base = gm
  modified_base 16: mod_base = OTHER; note = 2'-fluoroadenosine
  modified_base 17: mod_base = OTHER; note = 2'-O-methyladenosine
  modified_base 18: mod_base = OTHER; note = 2'-O-methyladenosine
  modified_base 19: mod_base = gm
  modified_base 20: mod_base = cm
  modified_base 20^21: mod_base = OTHER; note = phosphorothioate linkage
  modified_base 21: mod_base = um
  source 1..21: mol_type = other RNA
ataagctgaaacgagaaagct

SEQ ID NO: 1241 - RNA, 21 nt, synthetic construct
  modified_base 1: mod_base = OTHER; note = 2'-O-methyladenosine
  modified_base 1^2: mod_base = OTHER; note = phosphorothioate linkage
  modified_base 2: mod_base = OTHER; note = 2'-fluorouridine
  modified_base 2^3: mod_base = OTHER; note = phosphorothioate linkage
  modified_base 3: mod_base = OTHER; note = 2'-O-methyladenosine
  modified_base 3^4: mod_base = OTHER; note = phosphorothioate linkage
  modified_base 4: mod_base = OTHER; note = 2'-fluoroadenosine
  modified_base 5: mod_base = gm
  modified_base 6: mod_base = cm
  modified_base 7: mod_base = um
  modified_base 8: mod_base = gm
  modified_base 9: mod_base = OTHER; note = 2'-O-methyladenosine
  modified_base 10: mod_base = OTHER; note = 2'-O-methyladenosine
  modified_base 11: mod_base = OTHER; note = 2'-O-methyladenosine
  modified_base 12: mod_base = OTHER; note = 2'-fluorocytidine
  modified_base 13: mod_base = gm
  modified_base 14: mod_base = OTHER; note = 2'-fluoroadenosine
  modified_base 15: mod_base = gm
  modified_base 16: mod_base = OTHER; note = 2'-fluoroadenosine
  modified_base 17: mod_base = OTHER; note = 2'-O-methyladenosine
  modified_base 18: mod_base = OTHER; note = 2'-O-methyladenosine
  modified_base 19: mod_base = gm
  modified_base 20: mod_base = cm
  modified_base 20^21: mod_base = OTHER; note = phosphorothioate linkage
  modified_base 21: mod_base = um
  source 1..21: mol_type = other RNA
ataagctgaaacgagaaagct

SEQ ID NO: 1242 - RNA, 21 nt, synthetic construct
  modified_base 1: mod_base = OTHER; note = 5'-cyclopropyl phosphonate-2'-O-methyladenosine
  modified_base 1^2: mod_base = OTHER; note = phosphorothioate linkage
  modified_base 2: mod_base = OTHER; note = 2'-fluorouridine
  modified_base 2^3: mod_base = OTHER; note = phosphorothioate linkage
  modified_base 3: mod_base = OTHER; note = 2'-O-methyladenosine
  modified_base 3^4: mod_base = OTHER; note = phosphorothioate linkage
  modified_base 4: mod_base = OTHER; note = 2'-fluoroadenosine
  modified_base 5: mod_base = gm
  modified_base 6: mod_base = OTHER; note = 2'-fluorocytidine
  modified_base 7: mod_base = um
  modified_base 8: mod_base = gm
  modified_base 9: mod_base = OTHER; note = 2'-O-methyladenosine
  modified_base 10: mod_base = OTHER; note = 2'-O-methyladenosine
  modified_base 11: mod_base = OTHER; note = 2'-O-methyladenosine
  modified_base 12: mod_base = OTHER; note = 2'-fluorocytidine
  modified_base 13: mod_base = gm
  modified_base 14: mod_base = OTHER; note = 2'-fluoroadenosine
  modified_base 15: mod_base = gm
  modified_base 16: mod_base = OTHER; note = 2'-fluoroadenosine
  modified_base 17: mod_base = OTHER; note = 2'-O-methyladenosine
  modified_base 18: mod_base = OTHER; note = 2'-fluoroadenosine
  modified_base 19: mod_base = gm
  modified_base 20: mod_base = cm
  modified_base 20^21: mod_base = OTHER; note = phosphorothioate linkage
  modified_base 21: mod_base = um
  source 1..21: mol_type = other RNA
ataagctgaaacgagaaagct

SEQ ID NO: 1243 - RNA, 21 nt, synthetic construct
  modified_base 1: mod_base = OTHER; note = 5'-cyclopropyl phosphonate-2'-O-methyladenosine
  modified_base 1^2: mod_base = OTHER; note = phosphorothioate linkage
  modified_base 2: mod_base = OTHER; note = 2'-fluorouridine
  modified_base 2^3: mod_base = OTHER; note = phosphorothioate linkage
  modified_base 3: mod_base = OTHER; note = 2'-O-methyladenosine
  modified_base 4: mod_base = OTHER; note = 2'-fluoroadenosine
  modified_base 5: mod_base = gm
  modified_base 6: mod_base = OTHER; note = 2'-fluorocytidine
  modified_base 7: mod_base = um
  modified_base 8: mod_base = gm
  modified_base 9: mod_base = OTHER; note = 2'-O-methyladenosine
  modified_base 10: mod_base = OTHER; note = 2'-O-methyladenosine
  modified_base 11: mod_base = OTHER; note = 2'-O-methyladenosine
  modified_base 12: mod_base = OTHER; note = 2'-fluorocytidine
  modified_base 13: mod_base = gm
  modified_base 14: mod_base = OTHER; note = 2'-fluoroadenosine
  modified_base 15: mod_base = gm
  modified_base 16: mod_base = OTHER; note = 2'-fluoroadenosine
  modified_base 17: mod_base = OTHER; note = 2'-O-methyladenosine
  modified_base 18: mod_base = OTHER; note = 2'-fluoroadenosine
  modified_base 19: mod_base = gm
  modified_base 19^20: mod_base = OTHER; note = phosphorothioate linkage
  modified_base 20: mod_base = cm
  modified_base 20^21: mod_base = OTHER; note = phosphorothioate linkage
  modified_base 21: mod_base = um
  source 1..21: mol_type = other RNA
ataagctgaaacgagaaagct

SEQ ID NO: 1244 - RNA, 21 nt, synthetic construct
  modified_base 1: mod_base = OTHER; note = 5'-cyclopropyl phosphonate-2'-O-methyluridine
  modified_base 1^2: mod_base = OTHER; note = phosphorothioate linkage
  modified_base 2: mod_base = OTHER; note = 2'-fluorouridine
  modified_base 2^3: mod_base = OTHER; note = phosphorothioate linkage
  modified_base 3: mod_base = gm
  modified_base 3^4: mod_base = OTHER; note = phosphorothioate linkage
  modified_base 4: mod_base = OTHER; note = 2'-fluorouridine
  modified_base 5: mod_base = um
  modified_base 6: mod_base = OTHER; note = 2'-fluoroadenosine
  modified_base 7: mod_base = cm
  modified_base 8: mod_base = cm
  modified_base 9: mod_base = OTHER; note = 2'-O-methyladenosine
  modified_base 10: mod_base = um
  modified_base 11: mod_base = um
  modified_base 12: mod_base = OTHER; note = 2'-fluorocytidine
  modified_base 13: mod_base = cm
  modified_base 14: mod_base = OTHER; note = 2'-fluoroadenosine
  modified_base 15: mod_base = um
  modified_base 16: mod_base = OTHER; note = 2'-fluorouridine
  modified_base 17: mod_base = cm
  modified_base 18: mod_base = OTHER; note = 2'-fluoroadenosine
  modified_base 19: mod_base = OTHER; note = 2'-O-methyladenosine
  modified_base 20: mod_base = gm
  modified_base 20^21: mod_base = OTHER; note = phosphorothioate linkage
  modified_base 21: mod_base = cm
  source 1..21: mol_type = other RNA
ttgttaccattccattcaagc

SEQ ID NO: 1245 - RNA, 21 nt, synthetic construct
  modified_base 1: mod_base = OTHER; note = 5'-cyclopropyl phosphonate-2'-O-methyluridine
  modified_base 1^2: mod_base = OTHER; note = phosphorothioate linkage
  modified_base 2: mod_base = OTHER; note = 2'-fluorouridine
  modified_base 2^3: mod_base = OTHER; note = phosphorothioate linkage
  modified_base 3: mod_base = cm
  modified_base 3^4: mod_base = OTHER; note = phosphorothioate linkage
  modified_base 4: mod_base = OTHER; note = 2'-fluoroguanosine
  modified_base 5: mod_base = OTHER; note = 2'-O-methyladenosine
  modified_base 6: mod_base = OTHER; note = 2'-fluoroadenosine
  modified_base 7: mod_base = OTHER; note = 2'-O-methyladenosine
  modified_base 8: mod_base = cm
  modified_base 9: mod_base = um
  modified_base 10: mod_base = OTHER; note = 2'-O-methyladenosine
  modified_base 11: mod_base = um
  modified_base 12: mod_base = OTHER; note = 2'-fluorouridine
  modified_base 13: mod_base = cm
  modified_base 14: mod_base = OTHER; note = 2'-fluorouridine
  modified_base 15: mod_base = cm
  modified_base 16: mod_base = OTHER; note = 2'-fluorouridine
  modified_base 17: mod_base = gm
  modified_base 18: mod_base = OTHER; note = 2'-fluorouridine
  modified_base 19: mod_base = cm
  modified_base 20: mod_base = gm
  modified_base 20^21: mod_base = OTHER; note = phosphorothioate linkage
  modified_base 21: mod_base = cm
  source 1..21: mol_type = other RNA
ttcgaaactattctctgtcgc

SEQ ID NO: 1246 - RNA, 21 nt, synthetic construct
  modified_base 1: mod_base = OTHER; note = 5'-cyclopropyl phosphonate-2'-O-methyluridine
  modified_base 1^2: mod_base = OTHER; note = phosphorothioate linkage
  modified_base 2: mod_base = OTHER; note = 2'-fluoroguanosine
  modified_base 2^3: mod_base = OTHER; note = phosphorothioate linkage
  modified_base 3: mod_base = cm
  modified_base 3^4: mod_base = OTHER; note = phosphorothioate linkage
  modified_base 4: mod_base = OTHER; note = 2'-fluoroadenosine
  modified_base 5: mod_base = um
  modified_base 6: mod_base = OTHER; note = 2'-fluorouridine
  modified_base 7: mod_base = um
  modified_base 8: mod_base = um
  modified_base 9: mod_base = um
  modified_base 10: mod_base = gm
  modified_base 11: mod_base = OTHER; note = 2'-O-methyladenosine
  modified_base 12: mod_base = OTHER; note = 2'-fluorocytidine
  modified_base 13: mod_base = OTHER; note = 2'-O-methyladenosine
  modified_base 14: mod_base = OTHER; note = 2'-fluorouridine
  modified_base 15: mod_base = cm
  modified_base 16: mod_base = OTHER; note = 2'-fluorocytidine
  modified_base 17: mod_base = um
  modified_base 18: mod_base = OTHER; note = 2'-fluorocytidine
  modified_base 19: mod_base = OTHER; note = 2'-O-methyladenosine
  modified_base 20: mod_base = um
  modified_base 20^21: mod_base = OTHER; note = phosphorothioate linkage
  modified_base 21: mod_base = cm
  source 1..21: mol_type = other RNA
tgcatttttgacatcctcatc

SEQ ID NO: 1247 - RNA, 21 nt, synthetic construct
  modified_base 1: mod_base = OTHER; note = 5'-cyclopropyl phosphonate-2'-O-methyluridine
  modified_base 1^2: mod_base = OTHER; note = phosphorothioate linkage
  modified_base 2: mod_base = OTHER; note = 2'-fluoroadenosine
  modified_base 2^3: mod_base = OTHER; note = phosphorothioate linkage
  modified_base 3: mod_base = um
  modified_base 3^4: mod_base = OTHER; note = phosphorothioate linkage
  modified_base 4: mod_base = OTHER; note = 2'-fluorocytidine
  modified_base 5: mod_base = OTHER; note = 2'-O-methyladenosine
  modified_base 6: mod_base = OTHER; note = 2'-fluoroadenosine
  modified_base 7: mod_base = gm
  modified_base 8: mod_base = gm
  modified_base 9: mod_base = OTHER; note = 2'-O-methyladenosine
  modified_base 10: mod_base = OTHER; note = 2'-O-methyladenosine
  modified_base 11: mod_base = um
  modified_base 12: mod_base = OTHER; note = 2'-fluoroguanosine
  modified_base 13: mod_base = gm
  modified_base 14: mod_base = OTHER; note = 2'-fluoroguanosine
  modified_base 15: mod_base = gm
  modified_base 16: mod_base = OTHER; note = 2'-fluorocytidine
  modified_base 17: mod_base = OTHER; note = 2'-O-methyladenosine
  modified_base 18: mod_base = OTHER; note = 2'-fluorouridine
  modified_base 19: mod_base = cm
  modified_base 20: mod_base = OTHER; note = 2'-O-methyladenosine
  modified_base 20^21: mod_base = OTHER; note = phosphorothioate linkage
  modified_base 21: mod_base = cm
  source 1..21: mol_type = other RNA
tatcaaggaatggggcatcac

SEQ ID NO: 1248 - RNA, 21 nt, synthetic construct
  modified_base 1: mod_base = OTHER; note = 5'-cyclopropyl phosphonate-2'-O-methyluridine
  modified_base 1^2: mod_base = OTHER; note = phosphorothioate linkage
  modified_base 2: mod_base = OTHER; note = 2'-fluoroguanosine
  modified_base 2^3: mod_base = OTHER; note = phosphorothioate linkage
  modified_base 3: mod_base = OTHER; note = 2'-O-methyladenosine
  modified_base 3^4: mod_base = OTHER; note = phosphorothioate linkage
  modified_base 4: mod_base = OTHER; note = 2'-fluorouridine
  modified_base 5: mod_base = cm
  modified_base 6: mod_base = OTHER; note = 2'-fluoroadenosine
  modified_base 7: mod_base = OTHER; note = 2'-O-methyladenosine
  modified_base 8: mod_base = gm
  modified_base 9: mod_base = gm
  modified_base 10: mod_base = OTHER; note = 2'-O-methyladenosine
  modified_base 11: mod_base = OTHER; note = 2'-O-methyladenosine
  modified_base 12: mod_base = OTHER; note = 2'-fluorouridine
  modified_base 13: mod_base = gm
  modified_base 14: mod_base = OTHER; note = 2'-fluoroguanosine
  modified_base 15: mod_base = gm
  modified_base 16: mod_base = OTHER; note = 2'-fluoroguanosine
  modified_base 17: mod_base = cm
  modified_base 18: mod_base = OTHER; note = 2'-fluoroadenosine
  modified_base 19: mod_base = um
  modified_base 20: mod_base = cm
  modified_base 20^21: mod_base = OTHER; note = phosphorothioate linkage
  modified_base 21: mod_base = OTHER; note = 2'-O-methyladenosine
  source 1..21: mol_type = other RNA
tgatcaaggaatggggcatca

SEQ ID NO: 1249 - RNA, 21 nt, synthetic construct
  modified_base 1: mod_base = OTHER; note = 5'-cyclopropyl phosphonate-2'-O-methyluridine
  modified_base 1^2: mod_base = OTHER; note = phosphorothioate linkage
  modified_base 2: mod_base = OTHER; note = 2'-fluorocytidine
  modified_base 2^3: mod_base = OTHER; note = phosphorothioate linkage
  modified_base 3: mod_base = gm
  modified_base 3^4: mod_base = OTHER; note = phosphorothioate linkage
  modified_base 4: mod_base = OTHER; note = 2'-fluoroadenosine
  modified_base 5: mod_base = um
  modified_base 6: mod_base = OTHER; note = 2'-fluorocytidine
  modified_base 7: mod_base = OTHER; note = 2'-O-methyladenosine
  modified_base 8: mod_base = OTHER; note = 2'-O-methyladenosine
  modified_base 9: mod_base = gm
  modified_base 10: mod_base = gm
  modified_base 11: mod_base = OTHER; note = 2'-O-methyladenosine
  modified_base 12: mod_base = OTHER; note = 2'-fluoroadenosine
  modified_base 13: mod_base = um
  modified_base 14: mod_base = OTHER; note = 2'-fluoroguanosine
  modified_base 15: mod_base = gm
  modified_base 16: mod_base = OTHER; note = 2'-fluoroguanosine
  modified_base 17: mod_base = gm
  modified_base 18: mod_base = OTHER; note = 2'-fluorocytidine
  modified_base 19: mod_base = OTHER; note = 2'-O-methyladenosine
  modified_base 20: mod_base = um
  modified_base 20^21: mod_base = OTHER; note = phosphorothioate linkage
  modified_base 21: mod_base = cm
  source 1..21: mol_type = other RNA
tcgatcaaggaatggggcatc

SEQ ID NO: 1250 - RNA, 21 nt, synthetic construct
  modified_base 1: mod_base = OTHER; note = 5'-cyclopropyl phosphonate-2'-O-methyluridine
  modified_base 1^2: mod_base = OTHER; note = phosphorothioate linkage
  modified_base 2: mod_base = OTHER; note = 2'-fluorocytidine
  modified_base 2^3: mod_base = OTHER; note = phosphorothioate linkage
  modified_base 3: mod_base = OTHER; note = 2'-O-methyladenosine
  modified_base 3^4: mod_base = OTHER; note = phosphorothioate linkage
  modified_base 4: mod_base = OTHER; note = 2'-fluorouridine
  modified_base 5: mod_base = um
  modified_base 6: mod_base = OTHER; note = 2'-fluorocytidine
  modified_base 7: mod_base = OTHER; note = 2'-O-methyladenosine
  modified_base 8: mod_base = OTHER; note = 2'-O-methyladenosine
  modified_base 9: mod_base = gm
  modified_base 10: mod_base = um
  modified_base 11: mod_base = cm
  modified_base 12: mod_base = OTHER; note = 2'-fluorocytidine
  modified_base 13: mod_base = um
  modified_base 14: mod_base = OTHER; note = 2'-fluorocytidine
  modified_base 15: mod_base = cm
  modified_base 16: mod_base = OTHER; note = 2'-fluoroguanosine
  modified_base 17: mod_base = OTHER; note = 2'-O-methyladenosine
  modified_base 18: mod_base = OTHER; note = 2'-fluorouridine
  modified_base 19: mod_base = gm
  modified_base 20: mod_base = OTHER; note = 2'-O-methyladenosine
  modified_base 20^21: mod_base = OTHER; note = phosphorothioate linkage
  modified_base 21: mod_base = gm
  source 1..21: mol_type = other RNA
tcattcaagtcctccgatgag

SEQ ID NO: 1251 - RNA, 21 nt, synthetic construct
  modified_base 1: mod_base = OTHER; note = 5'-cyclopropyl phosphonate-2'-O-methyluridine
  modified_base 1^2: mod_base = OTHER; note = phosphorothioate linkage
  modified_base 2: mod_base = OTHER; note = 2'-fluorocytidine
  modified_base 2^3: mod_base = OTHER; note = phosphorothioate linkage
  modified_base 3: mod_base = cm
  modified_base 3^4: mod_base = OTHER; note = phosphorothioate linkage
  modified_base 4: mod_base = OTHER; note = 2'-fluoroadenosine
  modified_base 5: mod_base = um
  modified_base 6: mod_base = OTHER; note = 2'-fluorouridine
  modified_base 7: mod_base = cm
  modified_base 8: mod_base = OTHER; note = 2'-O-methyladenosine
  modified_base 9: mod_base = OTHER; note = 2'-O-methyladenosine
  modified_base 10: mod_base = gm
  modified_base 11: mod_base = um
  modified_base 12: mod_base = OTHER; note = 2'-fluorocytidine
  modified_base 13: mod_base = cm
  modified_base 14: mod_base = OTHER; note = 2'-fluorouridine
  modified_base 15: mod_base = cm
  modified_base 16: mod_base = OTHER; note = 2'-fluorocytidine
  modified_base 17: mod_base = gm
  modified_base 18: mod_base = OTHER; note = 2'-fluoroadenosine
  modified_base 19: mod_base = um
  modified_base 20: mod_base = gm
  modified_base 20^21: mod_base = OTHER; note = phosphorothioate linkage
  modified_base 21: mod_base = OTHER; note = 2'-O-methyladenosine
  source 1..21: mol_type = other RNA
tccattcaagtcctccgatga

SEQ ID NO: 1252 - RNA, 21 nt, synthetic construct
  modified_base 1: mod_base = OTHER; note = 5'-cyclopropyl phosphonate-2'-O-methyluridine
  modified_base 1^2: mod_base = OTHER; note = phosphorothioate linkage
  modified_base 2: mod_base = OTHER; note = 2'-fluorouridine
  modified_base 2^3: mod_base = OTHER; note = phosphorothioate linkage
  modified_base 3: mod_base = cm
  modified_base 3^4: mod_base = OTHER; note = phosphorothioate linkage
  modified_base 4: mod_base = OTHER; note = 2'-fluorocytidine
  modified_base 5: mod_base = OTHER; note = 2'-O-methyladenosine
  modified_base 6: mod_base = OTHER; note = 2'-fluorouridine
  modified_base 7: mod_base = um
  modified_base 8: mod_base = cm
  modified_base 9: mod_base = OTHER; note = 2'-O-methyladenosine
  modified_base 10: mod_base = OTHER; note = 2'-O-methyladenosine
  modified_base 11: mod_base = gm
  modified_base 12: mod_base = OTHER; note = 2'-fluorouridine
  modified_base 13: mod_base = cm
  modified_base 14: mod_base = OTHER; note = 2'-fluorocytidine
  modified_base 15: mod_base = um
  modified_base 16: mod_base = OTHER; note = 2'-fluorocytidine
  modified_base 17: mod_base = cm
  modified_base 18: mod_base = OTHER; note = 2'-fluoroguanosine
  modified_base 19: mod_base = OTHER; note = 2'-O-methyladenosine
  modified_base 20: mod_base = um
  modified_base 20^21: mod_base = OTHER; note = phosphorothioate linkage
  modified_base 21: mod_base = gm
  source 1..21: mol_type = other RNA
ttccattcaagtcctccgatg

SEQ ID NO: 1253 - RNA, 21 nt, synthetic construct
  modified_base 1: mod_base = OTHER; note = 5'-cyclopropyl phosphonate-2'-O-methyluridine
  modified_base 1^2: mod_base = OTHER; note = phosphorothioate linkage
  modified_base 2: mod_base = OTHER; note = 2'-fluoroadenosine
  modified_base 2^3: mod_base = OTHER; note = phosphorothioate linkage
  modified_base 3: mod_base = um
  modified_base 3^4: mod_base = OTHER; note = phosphorothioate linkage
  modified_base 4: mod_base = OTHER; note = 2'-fluorouridine
  modified_base 5: mod_base = cm
  modified_base 6: mod_base = OTHER; note = 2'-fluorocytidine
  modified_base 7: mod_base = OTHER; note = 2'-O-methyladenosine
  modified_base 8: mod_base = um
  modified_base 9: mod_base = um
  modified_base 10: mod_base = cm
  modified_base 11: mod_base = OTHER; note = 2'-O-methyladenosine
  modified_base 12: mod_base = OTHER; note = 2'-fluoroadenosine
  modified_base 13: mod_base = gm
  modified_base 14: mod_base = OTHER; note = 2'-fluorouridine
  modified_base 15: mod_base = cm
  modified_base 16: mod_base = OTHER; note = 2'-fluorocytidine
  modified_base 17: mod_base = um
  modified_base 18: mod_base = OTHER; note = 2'-fluorocytidine
  modified_base 19: mod_base = cm
  modified_base 20: mod_base = gm
  modified_base 20^21: mod_base = OTHER; note = phosphorothioate linkage
  modified_base 21: mod_base = OTHER; note = 2'-O-methyladenosine
  source 1..21: mol_type = other RNA
tattccattcaagtcctccga

SEQ ID NO: 1254 - RNA, 21 nt, synthetic construct
  modified_base 1: mod_base = OTHER; note = 5'-cyclopropyl phosphonate-2'-O-methyluridine
  modified_base 1^2: mod_base = OTHER; note = phosphorothioate linkage
  modified_base 2: mod_base = OTHER; note = 2'-fluorocytidine
  modified_base 2^3: mod_base = OTHER; note = phosphorothioate linkage
  modified_base 3: mod_base = OTHER; note = 2'-O-methyladenosine
  modified_base 3^4: mod_base = OTHER; note = phosphorothioate linkage
  modified_base 4: mod_base = OTHER; note = 2'-fluorouridine
  modified_base 5: mod_base = um
  modified_base 6: mod_base = OTHER; note = 2'-fluorocytidine
  modified_base 7: mod_base = cm
  modified_base 8: mod_base = OTHER; note = 2'-O-methyladenosine
  modified_base 9: mod_base = um
  modified_base 10: mod_base = um
  modified_base 11: mod_base = cm
  modified_base 12: mod_base = OTHER; note = 2'-fluoroadenosine
  modified_base 13: mod_base = OTHER; note = 2'-O-methyladenosine
  modified_base 14: mod_base = OTHER; note = 2'-fluoroguanosine
  modified_base 15: mod_base = um
  modified_base 16: mod_base = OTHER; note = 2'-fluorocytidine
  modified_base 17: mod_base = cm
  modified_base 18: mod_base = OTHER; note = 2'-fluorouridine
  modified_base 19: mod_base = cm
  modified_base 20: mod_base = cm
  modified_base 20^21: mod_base = OTHER; note = phosphorothioate linkage
  modified_base 21: mod_base = gm
  source 1..21: mol_type = other RNA
tcattccattcaagtcctccg

SEQ ID NO: 1255 - RNA, 21 nt, synthetic construct
  modified_base 1: mod_base = OTHER; note = 5'-cyclopropyl phosphonate-2'-O-methyladenosine
  modified_base 1^2: mod_base = OTHER; note = phosphorothioate linkage
  modified_base 2: mod_base = OTHER; note = 2'-fluorocytidine
  modified_base 2^3: mod_base = OTHER; note = phosphorothioate linkage
  modified_base 3: mod_base = OTHER; note = 2'-O-methyladenosine
  modified_base 3^4: mod_base = OTHER; note = phosphorothioate linkage
  modified_base 4: mod_base = OTHER; note = 2'-fluorocytidine
  modified_base 5: mod_base = um
  modified_base 6: mod_base = OTHER; note = 2'-fluoroguanosine
  modified_base 7: mod_base = OTHER; note = 2'-O-methyladenosine
  modified_base 8: mod_base = OTHER; note = 2'-O-methyladenosine
  modified_base 9: mod_base = gm
  modified_base 10: mod_base = um
  modified_base 11: mod_base = um
  modified_base 12: mod_base = OTHER; note = 2'-fluorocytidine
  modified_base 13: mod_base = gm
  modified_base 14: mod_base = OTHER; note = 2'-fluorocytidine
  modified_base 15: mod_base = um
  modified_base 16: mod_base = OTHER; note = 2'-fluorouridine
  modified_base 17: mod_base = um
  modified_base 18: mod_base = OTHER; note = 2'-fluorocytidine
  modified_base 19: mod_base = OTHER; note = 2'-O-methyladenosine
  modified_base 20: mod_base = gm
  modified_base 20^21: mod_base = OTHER; note = phosphorothioate linkage
  modified_base 21: mod_base = um
  source 1..21: mol_type = other RNA
acactgaagttcgctttcagt

SEQ ID NO: 1256 - RNA, 21 nt, synthetic construct
  modified_base 1: mod_base = OTHER; note = 5'-cyclopropyl phosphonate-2'-O-methyladenosine
  modified_base 1^2: mod_base = OTHER; note = phosphorothioate linkage
  modified_base 2: mod_base = OTHER; note = 2'-fluoroadenosine
  modified_base 2^3: mod_base = OTHER; note = phosphorothioate linkage
  modified_base 3: mod_base = gm
  modified_base 3^4: mod_base = OTHER; note = phosphorothioate linkage
  modified_base 4: mod_base = OTHER; note = 2'-fluorouridine
  modified_base 5: mod_base = OTHER; note = 2'-O-methyladenosine
  modified_base 6: mod_base = OTHER; note = 2'-fluorouridine
  modified_base 7: mod_base = gm
  modified_base 8: mod_base = um
  modified_base 9: mod_base = cm
  modified_base 10: mod_base = cm
  modified_base 11: mod_base = um
  modified_base 12: mod_base = OTHER; note = 2'-fluoroguanosine
  modified_base 13: mod_base = gm
  modified_base 14: mod_base = OTHER; note = 2'-fluoroadenosine
  modified_base 15: mod_base = OTHER; note = 2'-O-methyladenosine
  modified_base 16: mod_base = OTHER; note = 2'-fluoroguanosine
  modified_base 17: mod_base = OTHER; note = 2'-O-methyladenosine
  modified_base 18: mod_base = OTHER; note = 2'-fluoroguanosine
  modified_base 19: mod_base = OTHER; note = 2'-O-methyladenosine
  modified_base 20: mod_base = OTHER; note = 2'-O-methyladenosine
  modified_base 20^21: mod_base = OTHER; note = phosphorothioate linkage
  modified_base 21: mod_base = gm
  source 1..21: mol_type = other RNA
aagtatgtcctggaagagaag

SEQ ID NO: 1257 - RNA, 21 nt, synthetic construct
  modified_base 1: mod_base = OTHER; note = 5'-cyclopropyl phosphonate-2'-O-methyluridine
  modified_base 1^2: mod_base = OTHER; note = phosphorothioate linkage
  modified_base 2: mod_base = OTHER; note = 2'-fluorocytidine
  modified_base 2^3: mod_base = OTHER; note = phosphorothioate linkage
  modified_base 3: mod_base = cm
  modified_base 3^4: mod_base = OTHER; note = phosphorothioate linkage
  modified_base 4: mod_base = OTHER; note = 2'-fluoroadenosine
  modified_base 5: mod_base = OTHER; note = 2'-O-methyladenosine
  modified_base 6: mod_base = OTHER; note = 2'-fluorocytidine
  modified_base 7: mod_base = um
  modified_base 8: mod_base = gm
  modified_base 9: mod_base = cm
  modified_base 10: mod_base = OTHER; note = 2'-O-methyladenosine
  modified_base 11: mod_base = um
  modified_base 12: mod_base = OTHER; note = 2'-fluorouridine
  modified_base 13: mod_base = um
  modified_base 14: mod_base = OTHER; note = 2'-fluorouridine
  modified_base 15: mod_base = um
  modified_base 16: mod_base = OTHER; note = 2'-fluoroguanosine
  modified_base 17: mod_base = OTHER; note = 2'-O-methyladenosine
  modified_base 18: mod_base = OTHER; note = 2'-fluorocytidine
  modified_base 19: mod_base = OTHER; note = 2'-O-methyladenosine
  modified_base 20: mod_base = um
  modified_base 20^21: mod_base = OTHER; note = phosphorothioate linkage
  modified_base 21: mod_base = cm
  source 1..21: mol_type = other RNA
tccaactgcatttttgacatc

SEQ ID NO: 1258 - RNA, 21 nt, synthetic construct
  modified_base 1: mod_base = OTHER; note = 5'-cyclopropyl phosphonate-2'-O-methyladenosine
  modified_base 1^2: mod_base = OTHER; note = phosphorothioate linkage
  modified_base 2: mod_base = OTHER; note = 2'-fluoroadenosine
  modified_base 2^3: mod_base = OTHER; note = phosphorothioate linkage
  modified_base 3: mod_base = gm
  modified_base 3^4: mod_base = OTHER; note = phosphorothioate linkage
  modified_base 4: mod_base = OTHER; note = 2'-fluoroguanosine
  modified_base 5: mod_base = um
  modified_base 6: mod_base = OTHER; note = 2'-fluorocytidine
  modified_base 7: mod_base = um
  modified_base 8: mod_base = cm
  modified_base 9: mod_base = cm
  modified_base 10: mod_base = cm
  modified_base 11: mod_base = OTHER; note = 2'-O-methyladenosine
  modified_base 12: mod_base = OTHER; note = 2'-fluorouridine
  modified_base 13: mod_base = um
  modified_base 14: mod_base = OTHER; note = 2'-fluorocytidine
  modified_base 15: mod_base = um
  modified_base 16: mod_base = OTHER; note = 2'-fluorocytidine
  modified_base 17: mod_base = OTHER; note = 2'-O-methyladenosine
  modified_base 18: mod_base = OTHER; note = 2'-fluorouridine
  modified_base 19: mod_base = cm
  modified_base 20: mod_base = OTHER; note = 2'-O-methyladenosine
  modified_base 20^21: mod_base = OTHER; note = phosphorothioate linkage
  modified_base 21: mod_base = cm
  source 1..21: mol_type = other RNA
aaggtctcccattctcatcac

SEQ ID NO: 1259 - RNA, 21 nt, synthetic construct
  modified_base 1: mod_base = OTHER; note = 5'-cyclopropyl phosphonate-2'-O-methyluridine
  modified_base 1^2: mod_base = OTHER; note = phosphorothioate linkage
  modified_base 2: mod_base = OTHER; note = 2'-fluorouridine
  modified_base 2^3: mod_base = OTHER; note = phosphorothioate linkage
  modified_base 3: mod_base = gm
  modified_base 3^4: mod_base = OTHER; note = phosphorothioate linkage
  modified_base 4: mod_base = um
  modified_base 5: mod_base = um
  modified_base 6: mod_base = OTHER; note = 2'-O-methyladenosine
  modified_base 7: mod_base = OTHER; note = 2'-fluorocytidine
  modified_base 8: mod_base = cm
  modified_base 9: mod_base = OTHER; note = 2'-O-methyladenosine
  modified_base 10: mod_base = um
  modified_base 11: mod_base = um
  modified_base 12: mod_base = OTHER; note = 2'-fluorocytidine
  modified_base 13: mod_base = cm
  modified_base 14: mod_base = OTHER; note = 2'-fluoroadenosine
  modified_base 15: mod_base = um
  modified_base 16: mod_base = OTHER; note = 2'-fluorouridine
  modified_base 17: mod_base = cm
  modified_base 18: mod_base = OTHER; note = 2'-O-methyladenosine
  modified_base 19: mod_base = OTHER; note = 2'-O-methyladenosine
  modified_base 20: mod_base = gm
  modified_base 20^21: mod_base = OTHER; note = phosphorothioate linkage
  modified_base 21: mod_base = cm
  source 1..21: mol_type = other RNA
ttgttaccattccattcaagc

SEQ ID NO: 1260 - RNA, 21 nt, synthetic construct
  modified_base 1: mod_base = OTHER; note = 5'-cyclopropyl phosphonate-2'-O-methyluridine
  modified_base 1^2: mod_base = OTHER; note = phosphorothioate linkage
  modified_base 2: mod_base = OTHER; note = 2'-fluorouridine
  modified_base 2^3: mod_base = OTHER; note = phosphorothioate linkage
  modified_base 3: mod_base = cm
  modified_base 3^4: mod_base = OTHER; note = phosphorothioate linkage
  modified_base 4: mod_base = gm
  modified_base 5: mod_base = OTHER; note = 2'-O-methyladenosine
  modified_base 6: mod_base = OTHER; note = 2'-O-methyladenosine
  modified_base 7: mod_base = OTHER; note = 2'-fluoroadenosine
  modified_base 8: mod_base = cm
  modified_base 9: mod_base = um
  modified_base 10: mod_base = OTHER; note = 2'-O-methyladenosine
  modified_base 11: mod_base = um
  modified_base 12: mod_base = OTHER; note = 2'-fluorouridine
  modified_base 13: mod_base = cm
  modified_base 14: mod_base = OTHER; note = 2'-fluorouridine
  modified_base 15: mod_base = cm
  modified_base 16: mod_base = OTHER; note = 2'-fluorouridine
  modified_base 17: mod_base = gm
  modified_base 18: mod_base = um
  modified_base 19: mod_base = cm
  modified_base 20: mod_base = gm
  modified_base 20^21: mod_base = OTHER; note = phosphorothioate linkage
  modified_base 21: mod_base = cm
  source 1..21: mol_type = other RNA
ttcgaaactattctctgtcgc

SEQ ID NO: 1261 - RNA, 21 nt, synthetic construct
  modified_base 1: mod_base = OTHER; note = 5'-cyclopropyl phosphonate-2'-O-methyluridine
  modified_base 1^2: mod_base = OTHER; note = phosphorothioate linkage
  modified_base 2: mod_base = OTHER; note = 2'-fluorouridine
  modified_base 2^3: mod_base = OTHER; note = phosphorothioate linkage
  modified_base 3: mod_base = gm
  modified_base 3^4: mod_base = OTHER; note = phosphorothioate linkage
  modified_base 4: mod_base = OTHER; note = 2'-fluoroguanosine
  modified_base 5: mod_base = OTHER; note = 2'-O-methyladenosine
  modified_base 6: mod_base = OTHER; note = 2'-fluorouridine
  modified_base 7: mod_base = um
  modified_base 8: mod_base = cm
  modified_base 9: mod_base = cm
  modified_base 10: mod_base = um
  modified_base 11: mod_base = cm
  modified_base 12: mod_base = OTHER; note = 2'-fluorouridine
  modified_base 13: mod_base = um
  modified_base 14: mod_base = OTHER; note = 2'-fluorouridine
  modified_base 15: mod_base = cm
  modified_base 16: mod_base = OTHER; note = 2'-fluoroadenosine
  modified_base 17: mod_base = OTHER; note = 2'-O-methyladenosine
  modified_base 18: mod_base = OTHER; note = 2'-fluoroguanosine
  modified_base 19: mod_base = OTHER; note = 2'-O-methyladenosine
  modified_base 20: mod_base = um
  modified_base 20^21: mod_base = OTHER; note = phosphorothioate linkage
  modified_base 21: mod_base = cm
  source 1..21: mol_type = other RNA
ttggattcctctttcaagatc

SEQ ID NO: 1262 - RNA, 21 nt, synthetic construct
  modified_base 1: mod_base = OTHER; note = 5'-cyclopropyl phosphonate-2'-O-methyladenosine
  modified_base 1^2: mod_base = OTHER; note = phosphorothioate linkage
  modified_base 2: mod_base = OTHER; note = 2'-fluorouridine
  modified_base 2^3: mod_base = OTHER; note = phosphorothioate linkage
  modified_base 3: mod_base = gm
  modified_base 3^4: mod_base = OTHER; note = phosphorothioate linkage
  modified_base 4: mod_base = OTHER; note = 2'-fluoroadenosine
  modified_base 5: mod_base = gm
  modified_base 6: mod_base = OTHER; note = 2'-fluorocytidine
  modified_base 7: mod_base = OTHER; note = 2'-O-methyladenosine
  modified_base 8: mod_base = um
  modified_base 9: mod_base = gm
  modified_base 10: mod_base = OTHER; note = 2'-O-methyladenosine
  modified_base 11: mod_base = OTHER; note = 2'-O-methyladenosine
  modified_base 12: mod_base = OTHER; note = 2'-fluorocytidine
  modified_base 13: mod_base = cm
  modified_base 14: mod_base = OTHER; note = 2'-fluoroadenosine
  modified_base 15: mod_base = gm
  modified_base 16: mod_base = OTHER; note = 2'-fluorouridine
  modified_base 17: mod_base = cm
  modified_base 18: mod_base = OTHER; note = 2'-fluorouridine
  modified_base 19: mod_base = cm
  modified_base 20: mod_base = gm
  modified_base 20^21: mod_base = OTHER; note = phosphorothioate linkage
  modified_base 21: mod_base = um
  source 1..21: mol_type = other RNA
atgagcatgaaccagtctcgt

SEQ ID NO: 1263 - RNA, 21 nt, synthetic construct
  modified_base 1: mod_base = OTHER; note = 5'-cyclopropyl phosphonate-2'-O-methyladenosine
  modified_base 1^2: mod_base = OTHER; note = phosphorothioate linkage
  modified_base 2: mod_base = OTHER; note = 2'-fluoroadenosine
  modified_base 2^3: mod_base = OTHER; note = phosphorothioate linkage
  modified_base 3: mod_base = OTHER; note = 2'-O-methyladenosine
  modified_base 3^4: mod_base = OTHER; note = phosphorothioate linkage
  modified_base 4: mod_base = OTHER; note = 2'-fluoroguanosine
  modified_base 5: mod_base = OTHER; note = 2'-O-methyladenosine
  modified_base 6: mod_base = OTHER; note = 2'-fluorouridine
  modified_base 7: mod_base = um
  modified_base 8: mod_base = OTHER; note = 2'-O-methyladenosine
  modified_base 9: mod_base = cm
  modified_base 10: mod_base = OTHER; note = 2'-O-methyladenosine
  modified_base 11: mod_base = cm
  modified_base 12: mod_base = OTHER; note = 2'-fluorouridine
  modified_base 13: mod_base = gm
  modified_base 14: mod_base = OTHER; note = 2'-fluoroadenosine
  modified_base 15: mod_base = OTHER; note = 2'-O-methyladenosine
  modified_base 16: mod_base = OTHER; note = 2'-fluoroguanosine
  modified_base 17: mod_base = um
  modified_base 18: mod_base = OTHER; note = 2'-fluorouridine
  modified_base 19: mod_base = cm
  modified_base 20: mod_base = gm
  modified_base 20^21: mod_base = OTHER; note = phosphorothioate linkage
  modified_base 21: mod_base = cm
  source 1..21: mol_type = other RNA
aaagattacactgaagttcgc

SEQ ID NO: 1264 - RNA, 21 nt, synthetic construct
  modified_base 1: mod_base = OTHER; note = 5'-cyclopropyl phosphonate-2'-O-methyluridine
  modified_base 1^2: mod_base = OTHER; note = phosphorothioate linkage
  modified_base 2: mod_base = OTHER; note = 2'-fluorouridine
  modified_base 2^3: mod_base = OTHER; note = phosphorothioate linkage
  modified_base 3: mod_base = OTHER; note = 2'-O-methyladenosine
  modified_base 3^4: mod_base = OTHER; note = phosphorothioate linkage
  modified_base 4: mod_base = OTHER; note = 2'-fluorouridine
  modified_base 5: mod_base = cm
  modified_base 6: mod_base = OTHER; note = 2'-fluoroadenosine
  modified_base 7: mod_base = OTHER; note = 2'-O-methyladenosine
  modified_base 8: mod_base = gm
  modified_base 9: mod_base = gm
  modified_base 10: mod_base = um
  modified_base 11: mod_base = cm
  modified_base 12: mod_base = OTHER; note = 2'-fluorouridine
  modified_base 13: mod_base = cm
  modified_base 14: mod_base = OTHER; note = 2'-fluorouridine
  modified_base 15: mod_base = OTHER; note = 2'-O-methyladenosine
  modified_base 16: mod_base = OTHER; note = 2'-fluoroadenosine
  modified_base 17: mod_base = um
  modified_base 18: mod_base = OTHER; note = 2'-fluorocytidine
  modified_base 19: mod_base = gm
  modified_base 20: mod_base = gm
  modified_base 20^21: mod_base = OTHER; note = phosphorothioate linkage
  modified_base 21: mod_base = um
  source 1..21: mol_type = other RNA
ttatcaaggtctctaatcggt

SEQ ID NO: 1265 - RNA, 21 nt, synthetic construct
  modified_base 1: mod_base = OTHER; note = 5'-cyclopropyl phosphonate-2'-O-methyladenosine
  modified_base 1^2: mod_base = OTHER; note = phosphorothioate linkage
  modified_base 2: mod_base = OTHER; note = 2'-fluoroguanosine
  modified_base 2^3: mod_base = OTHER; note = phosphorothioate linkage
  modified_base 3: mod_base = um
  modified_base 3^4: mod_base = OTHER; note = phosphorothioate linkage
  modified_base 4: mod_base = OTHER; note = 2'-fluoroguanosine
  modified_base 5: mod_base = OTHER; note = 2'-O-methyladenosine
  modified_base 6: mod_base = OTHER; note = 2'-fluoroadenosine
  modified_base 7: mod_base = OTHER; note = 2'-O-methyladenosine
  modified_base 8: mod_base = gm
  modified_base 9: mod_base = cm
  modified_base 10: mod_base = cm
  modified_base 11: mod_base = cm
  modified_base 12: mod_base = OTHER; note = 2'-fluorouridine
  modified_base 13: mod_base = um
  modified_base 14: mod_base = OTHER; note = 2'-fluoroadenosine
  modified_base 15: mod_base = gm
  modified_base 16: mod_base = OTHER; note = 2'-fluorouridine
  modified_base 17: mod_base = OTHER; note = 2'-O-methyladenosine
  modified_base 18: mod_base = OTHER; note = 2'-fluoroguanosine
  modified_base 19: mod_base = um
  modified_base 20: mod_base = OTHER; note = 2'-O-methyladenosine
  modified_base 20^21: mod_base = OTHER; note = phosphorothioate linkage
  modified_base 21: mod_base = cm
  source 1..21: mol_type = other RNA
agtgaaagcccttagtagtac

SEQ ID NO: 1266 - RNA, 21 nt, synthetic construct
  modified_base 1: mod_base = OTHER; note = 5'-cyclopropyl phosphonate-2'-O-methyladenosine
  modified_base 1^2: mod_base = OTHER; note = phosphorothioate linkage
  modified_base 2: mod_base = OTHER; note = 2'-fluorocytidine
  modified_base 2^3: mod_base = OTHER; note = phosphorothioate linkage
  modified_base 3: mod_base = um
  modified_base 3^4: mod_base = OTHER; note = phosphorothioate linkage
  modified_base 4: mod_base = OTHER; note = 2'-fluorocytidine
  modified_base 5: mod_base = gm
  modified_base 6: mod_base = OTHER; note = 2'-fluoroadenosine
  modified_base 7: mod_base = OTHER; note = 2'-O-methyladenosine
  modified_base 8: mod_base = cm
  modified_base 9: mod_base = cm
  modified_base 10: mod_base = gm
  modified_base 11: mod_base = um
  modified_base 12: mod_base = OTHER; note = 2'-fluoroguanosine
  modified_base 13: mod_base = um
  modified_base 14: mod_base = OTHER; note = 2'-fluorouridine
  modified_base 15: mod_base = OTHER; note = 2'-O-methyladenosine
  modified_base 16: mod_base = OTHER; note = 2'-fluorocytidine
  modified_base 17: mod_base = cm
  modified_base 18: mod_base = OTHER; note = 2'-fluoroadenosine
  modified_base 19: mod_base = um
  modified_base 20: mod_base = um
  modified_base 20^21: mod_base = OTHER; note = phosphorothioate linkage
  modified_base 21: mod_base = cm
  source 1..21: mol_type = other RNA
actcgaaccgtgttaccattc

SEQ ID NO: 1267 - RNA, 21 nt, synthetic construct
  modified_base 1: mod_base = OTHER; note = 5'-cyclopropyl phosphonate-2'-O-methyluridine
  modified_base 1^2: mod_base = OTHER; note = phosphorothioate linkage
  modified_base 2: mod_base = OTHER; note = 2'-fluoroadenosine
  modified_base 2^3: mod_base = OTHER; note = phosphorothioate linkage
  modified_base 3: mod_base = gm
  modified_base 3^4: mod_base = OTHER; note = phosphorothioate linkage
  modified_base 4: mod_base = OTHER; note = 2'-fluoroadenosine
  modified_base 5: mod_base = cm
  modified_base 6: mod_base = OTHER; note = 2'-fluorouridine
  modified_base 7: mod_base = cm
  modified_base 8: mod_base = gm
  modified_base 9: mod_base = OTHER; note = 2'-O-methyladenosine
  modified_base 10: mod_base = OTHER; note = 2'-O-methyladenosine
  modified_base 11: mod_base = cm
  modified_base 12: mod_base = OTHER; note = 2'-fluorocytidine
  modified_base 13: mod_base = gm
  modified_base 14: mod_base = OTHER; note = 2'-fluorouridine
  modified_base 15: mod_base = gm
  modified_base 16: mod_base = OTHER; note = 2'-fluorouridine
  modified_base 17: mod_base = um
  modified_base 18: mod_base = OTHER; note = 2'-fluoroadenosine
  modified_base 19: mod_base = cm
  modified_base 20: mod_base = cm
  modified_base 20^21: mod_base = OTHER; note = phosphorothioate linkage
  modified_base 21: mod_base = OTHER; note = 2'-O-methyladenosine
  source 1..21: mol_type = other RNA
tagactcgaaccgtgttacca

SEQ ID NO: 1268 - RNA, 21 nt, synthetic construct
  modified_base 1: mod_base = OTHER; note = 5'-cyclopropyl phosphonate-2'-O-methyluridine
  modified_base 1^2: mod_base = OTHER; note = phosphorothioate linkage
  modified_base 2: mod_base = OTHER; note = 2'-fluoroadenosine
  modified_base 2^3: mod_base = OTHER; note = phosphorothioate linkage
  modified_base 3: mod_base = gm
  modified_base 3^4: mod_base = OTHER; note = phosphorothioate linkage
  modified_base 4: mod_base = OTHER; note = 2'-fluorouridine
  modified_base 5: mod_base = um
  modified_base 6: mod_base = OTHER; note = 2'-fluoroguanosine
  modified_base 7: mod_base = um
  modified_base 8: mod_base = OTHER; note = 2'-O-methyladenosine
  modified_base 9: mod_base = OTHER; note = 2'-O-methyladenosine
  modified_base 10: mod_base = gm
  modified_base 11: mod_base = gm
  modified_base 12: mod_base = OTHER; note = 2'-fluorocytidine
  modified_base 13: mod_base = um
  modified_base 14: mod_base = OTHER; note = 2'-fluorouridine
  modified_base 15: mod_base = gm
  modified_base 16: mod_base = OTHER; note = 2'-fluorocytidine
  modified_base 17: mod_base = OTHER; note = 2'-O-methyladenosine
  modified_base 18: mod_base = OTHER; note = 2'-fluorouridine
  modified_base 19: mod_base = OTHER; note = 2'-O-methyladenosine
  modified_base 20: mod_base = OTHER; note = 2'-O-methyladenosine
  modified_base 20^21: mod_base = OTHER; note = phosphorothioate linkage
  modified_base 21: mod_base = cm
  source 1..21: mol_type = other RNA
tagttgtaaggcttgcataac

SEQ ID NO: 1269 - RNA, 21 nt, synthetic construct
  modified_base 1: mod_base = OTHER; note = 5'-cyclopropyl phosphonate-2'-O-methyladenosine
  modified_base 1^2: mod_base = OTHER; note = phosphorothioate linkage
  modified_base 2: mod_base = OTHER; note = 2'-fluoroadenosine
  modified_base 2^3: mod_base = OTHER; note = phosphorothioate linkage
  modified_base 3: mod_base = cm
  modified_base 3^4: mod_base = OTHER; note = phosphorothioate linkage
  modified_base 4: mod_base = OTHER; note = 2'-fluoroguanosine
  modified_base 5: mod_base = OTHER; note = 2'-O-methyladenosine
  modified_base 6: mod_base = OTHER; note = 2'-fluoroguanosine
  modified_base 7: mod_base = OTHER; note = 2'-O-methyladenosine
  modified_base 8: mod_base = OTHER; note = 2'-O-methyladenosine
  modified_base 9: mod_base = OTHER; note = 2'-O-methyladenosine
  modified_base 10: mod_base = gm
  modified_base 11: mod_base = cm
  modified_base 12: mod_base = OTHER; note = 2'-fluorouridine
  modified_base 13: mod_base = cm
  modified_base 14: mod_base = OTHER; note = 2'-fluorouridine
  modified_base 15: mod_base = um
  modified_base 16: mod_base = OTHER; note = 2'-fluoroadenosine
  modified_base 17: mod_base = um
  modified_base 18: mod_base = OTHER; note = 2'-fluorocytidine
  modified_base 19: mod_base = um
  modified_base 20: mod_base = cm
  modified_base 20^21: mod_base = OTHER; note = phosphorothioate linkage
  modified_base 21: mod_base = cm
  source 1..21: mol_type = other RNA
aacgagaaagctcttatctcc

SEQ ID NO: 1270 - RNA, 21 nt, synthetic construct
  modified_base 1: mod_base = um
  modified_base 1^2: mod_base = OTHER; note = phosphorothioate linkage
  modified_base 2: mod_base = OTHER; note = 2'-fluoroadenosine
  modified_base 2^3: mod_base = OTHER; note = phosphorothioate linkage
  modified_base 3: mod_base = gm
  modified_base 3^4: mod_base = OTHER; note = phosphorothioate linkage
  modified_base 4: mod_base = OTHER; note = 2'-fluorouridine
  modified_base 5: mod_base = OTHER; note = 2'-O-methyladenosine
  modified_base 6: mod_base = OTHER; note = 2'-fluorouridine
  modified_base 7: mod_base = OTHER; note = 2'-O-methyladenosine
  modified_base 8: mod_base = OTHER; note = 2'-O-methyladenosine
  modified_base 9: mod_base = gm
  modified_base 10: mod_base = gm
  modified_base 11: mod_base = gm
  modified_base 12: mod_base = OTHER; note = 2'-fluoroadenosine
  modified_base 13: mod_base = OTHER; note = 2'-O-methyladenosine
  modified_base 14: mod_base = OTHER; note = 2'-fluorouridine
  modified_base 15: mod_base = gm
  modified_base 16: mod_base = OTHER; note = 2'-fluorouridine
  modified_base 17: mod_base = gm
  modified_base 18: mod_base = OTHER; note = 2'-fluoroguanosine
  modified_base 19: mod_base = um
  modified_base 20: mod_base = gm
  modified_base 20^21: mod_base = OTHER; note = phosphorothioate linkage
  modified_base 21: mod_base = cm
  source 1..21: mol_type = other RNA
tagtataagggaatgtggtgc

SEQ ID NO: 1271 - RNA, 21 nt, synthetic construct
  modified_base 1: mod_base = um
  modified_base 1^2: mod_base = OTHER; note = phosphorothioate linkage
  modified_base 2: mod_base = OTHER; note = 2'-fluoroadenosine
  modified_base 2^3: mod_base = OTHER; note = phosphorothioate linkage
  modified_base 3: mod_base = gm
  modified_base 3^4: mod_base = OTHER; note = phosphorothioate linkage
  modified_base 4: mod_base = OTHER; note = 2'-fluorouridine
  modified_base 5: mod_base = OTHER; note = 2'-O-methyladenosine
  modified_base 6: mod_base = OTHER; note = 2'-fluorouridine
  modified_base 7: mod_base = um
  modified_base 8: mod_base = gm
  modified_base 9: mod_base = gm
  modified_base 10: mod_base = um
  modified_base 11: mod_base = gm
  modified_base 12: mod_base = OTHER; note = 2'-fluorouridine
  modified_base 13: mod_base = gm
  modified_base 14: mod_base = OTHER; note = 2'-fluorouridine
  modified_base 15: mod_base = um
  modified_base 16: mod_base = OTHER; note = 2'-fluorocytidine
  modified_base 17: mod_base = um
  modified_base 18: mod_base = OTHER; note = 2'-fluoroguanosine
  modified_base 19: mod_base = um
  modified_base 20: mod_base = um
  modified_base 20^21: mod_base = OTHER; note = phosphorothioate linkage
  modified_base 21: mod_base = cm
  source 1..21: mol_type = other RNA
tagtattggtgtgttctgttc

SEQ ID NO: 1272 - RNA, 21 nt, synthetic construct
  modified_base 1: mod_base = um
  modified_base 1^2: mod_base = OTHER; note = phosphorothioate linkage
  modified_base 2: mod_base = OTHER; note = 2'-fluorouridine
  modified_base 2^3: mod_base = OTHER; note = phosphorothioate linkage
  modified_base 3: mod_base = cm
  modified_base 3^4: mod_base = OTHER; note = phosphorothioate linkage
  modified_base 4: mod_base = OTHER; note = 2'-fluorocytidine
  modified_base 5: mod_base = OTHER; note = 2'-O-methyladenosine
  modified_base 6: mod_base = OTHER; note = 2'-fluorouridine
  modified_base 7: mod_base = um
  modified_base 8: mod_base = gm
  modified_base 9: mod_base = um
  modified_base 10: mod_base = um
  modified_base 11: mod_base = um
  modified_base 12: mod_base = OTHER; note = 2'-fluorocytidine
  modified_base 13: mod_base = OTHER; note = 2'-O-methyladenosine
  modified_base 14: mod_base = OTHER; note = 2'-fluoroadenosine
  modified_base 15: mod_base = gm
  modified_base 16: mod_base = OTHER; note = 2'-fluoroguanosine
  modified_base 17: mod_base = cm
  modified_base 18: mod_base = OTHER; note = 2'-fluoroadenosine
  modified_base 19: mod_base = um
  modified_base 20: mod_base = gm
  modified_base 20^21: mod_base = OTHER; note = phosphorothioate linkage
  modified_base 21: mod_base = OTHER; note = 2'-O-methyladenosine
  source 1..21: mol_type = other RNA
ttccattgtttcaaggcatga

SEQ ID NO: 1273 - RNA, 21 nt, synthetic construct
  modified_base 1: mod_base = OTHER; note = 2'-O-methyladenosine
  modified_base 1^2: mod_base = OTHER; note = phosphorothioate linkage
  modified_base 2: mod_base = OTHER; note = 2'-fluoroadenosine
  modified_base 2^3: mod_base = OTHER; note = phosphorothioate linkage
  modified_base 3: mod_base = gm
  modified_base 3^4: mod_base = OTHER; note = phosphorothioate linkage
  modified_base 4: mod_base = OTHER; note = 2'-fluoroadenosine
  modified_base 5: mod_base = cm
  modified_base 6: mod_base = OTHER; note = 2'-fluorouridine
  modified_base 7: mod_base = um
  modified_base 8: mod_base = cm
  modified_base 9: mod_base = um
  modified_base 10: mod_base = OTHER; note = 2'-O-methyladenosine
  modified_base 11: mod_base = um
  modified_base 12: mod_base = OTHER; note = 2'-fluoroguanosine
  modified_base 13: mod_base = gm
  modified_base 14: mod_base = OTHER; note = 2'-fluorouridine
  modified_base 15: mod_base = gm
  modified_base 16: mod_base = OTHER; note = 2'-fluorouridine
  modified_base 17: mod_base = um
  modified_base 18: mod_base = OTHER; note = 2'-fluoroguanosine
  modified_base 19: mod_base = gm
  modified_base 20: mod_base = cm
  modified_base 20^21: mod_base = OTHER; note = phosphorothioate linkage
  modified_base 21: mod_base = cm
  source 1..21: mol_type = other RNA
aagacttctatggtgttggcc

SEQ ID NO: 1274 - RNA, 21 nt, synthetic construct
  modified_base 1: mod_base = um
  modified_base 1^2: mod_base = OTHER; note = phosphorothioate linkage
  modified_base 2: mod_base = OTHER; note = 2'-fluoroguanosine
  modified_base 2^3: mod_base = OTHER; note = phosphorothioate linkage
  modified_base 3: mod_base = gm
  modified_base 3^4: mod_base = OTHER; note = phosphorothioate linkage
  modified_base 4: mod_base = OTHER; note = 2'-fluorouridine
  modified_base 5: mod_base = cm
  modified_base 6: mod_base = OTHER; note = 2'-fluoroadenosine
  modified_base 7: mod_base = um
  modified_base 8: mod_base = gm
  modified_base 9: mod_base = um
  modified_base 10: mod_base = um
  modified_base 11: mod_base = gm
  modified_base 12: mod_base = OTHER; note = 2'-fluorouridine
  modified_base 13: mod_base = cm
  modified_base 14: mod_base = OTHER; note = 2'-fluorouridine
  modified_base 15: mod_base = cm
  modified_base 16: mod_base = OTHER; note = 2'-fluorouridine
  modified_base 17: mod_base = um
  modified_base 18: mod_base = OTHER; note = 2'-fluoroadenosine
  modified_base 19: mod_base = cm
  modified_base 20: mod_base = um
  modified_base 20^21: mod_base = OTHER; note = phosphorothioate linkage
  modified_base 21: mod_base = cm
  source 1..21: mol_type = other RNA
tggtcatgttgtctcttactc

SEQ ID NO: 1275 - RNA, 21 nt, synthetic construct
  modified_base 1: mod_base = um
  modified_base 1^2: mod_base = OTHER; note = phosphorothioate linkage
  modified_base 2: mod_base = OTHER; note = 2'-fluorocytidine
  modified_base 2^3: mod_base = OTHER; note = phosphorothioate linkage
  modified_base 3: mod_base = OTHER; note = 2'-O-methyladenosine
  modified_base 3^4: mod_base = OTHER; note = phosphorothioate linkage
  modified_base 4: mod_base = OTHER; note = 2'-fluoroadenosine
  modified_base 5: mod_base = gm
  modified_base 6: mod_base = OTHER; note = 2'-fluorocytidine
  modified_base 7: mod_base = um
  modified_base 8: mod_base = um
  modified_base 9: mod_base = um
  modified_base 10: mod_base = um
  modified_base 11: mod_base = cm
  modified_base 12: mod_base = OTHER; note = 2'-fluoroguanosine
  modified_base 13: mod_base = cm
  modified_base 14: mod_base = OTHER; note = 2'-fluoroadenosine
  modified_base 15: mod_base = OTHER; note = 2'-O-methyladenosine
  modified_base 16: mod_base = OTHER; note = 2'-fluoroadenosine
  modified_base 17: mod_base = um
  modified_base 18: mod_base = OTHER; note = 2'-fluoroguanosine
  modified_base 19: mod_base = cm
  modified_base 20: mod_base = um
  modified_base 20^21: mod_base = OTHER; note = phosphorothioate linkage
  modified_base 21: mod_base = cm
  source 1..21: mol_type = other RNA
tcaagcttttcgcaaatgctc

SEQ ID NO: 1276 - RNA, 21 nt, synthetic construct
  modified_base 1: mod_base = OTHER; note = 2'-O-methyladenosine
  modified_base 1^2: mod_base = OTHER; note = phosphorothioate linkage
  modified_base 2: mod_base = OTHER; note = 2'-fluorocytidine
  modified_base 2^3: mod_base = OTHER; note = phosphorothioate linkage
  modified_base 3: mod_base = um
  modified_base 3^4: mod_base = OTHER; note = phosphorothioate linkage
  modified_base 4: mod_base = OTHER; note = 2'-fluorouridine
  modified_base 5: mod_base = OTHER; note = 2'-O-methyladenosine
  modified_base 6: mod_base = OTHER; note = 2'-fluoroguanosine
  modified_base 7: mod_base = um
  modified_base 8: mod_base = gm
  modified_base 9: mod_base = um
  modified_base 10: mod_base = um
  modified_base 11: mod_base = gm
  modified_base 12: mod_base = OTHER; note = 2'-fluorouridine
  modified_base 13: mod_base = cm
  modified_base 14: mod_base = OTHER; note = 2'-fluorocytidine
  modified_base 15: mod_base = cm
  modified_base 16: mod_base = OTHER; note = 2'-fluorocytidine
  modified_base 17: mod_base = OTHER; note = 2'-O-methyladenosine
  modified_base 18: mod_base = OTHER; note = 2'-fluoroguanosine
  modified_base 19: mod_base = um
  modified_base 20: mod_base = gm
  modified_base 20^21: mod_base = OTHER; note = phosphorothioate linkage
  modified_base 21: mod_base = OTHER; note = 2'-O-methyladenosine
  source 1..21: mol_type = other RNA
acttagtgttgtccccagtga

SEQ ID NO: 1277 - RNA, 21 nt, synthetic construct
  modified_base 1: mod_base = um
  modified_base 1^2: mod_base = OTHER; note = phosphorothioate linkage
  modified_base 2: mod_base = OTHER; note = 2'-fluorocytidine
  modified_base 2^3: mod_base = OTHER; note = phosphorothioate linkage
  modified_base 3: mod_base = cm
  modified_base 3^4: mod_base = OTHER; note = phosphorothioate linkage
  modified_base 4: mod_base = OTHER; note = 2'-fluorouridine
  modified_base 5: mod_base = OTHER; note = 2'-O-methyladenosine
  modified_base 6: mod_base = OTHER; note = 2'-fluoroguanosine
  modified_base 7: mod_base = um
  modified_base 8: mod_base = cm
  modified_base 9: mod_base = um
  modified_base 10: mod_base = um
  modified_base 11: mod_base = gm
  modified_base 12: mod_base = OTHER; note = 2'-fluorocytidine
  modified_base 13: mod_base = cm
  modified_base 14: mod_base = OTHER; note = 2'-fluoroadenosine
  modified_base 15: mod_base = um
  modified_base 16: mod_base = OTHER; note = 2'-fluorouridine
  modified_base 17: mod_base = um
  modified_base 18: mod_base = OTHER; note = 2'-fluorouridine
  modified_base 19: mod_base = gm
  modified_base 20: mod_base = um
  modified_base 20^21: mod_base = OTHER; note = phosphorothioate linkage
  modified_base 21: mod_base = cm
  source 1..21: mol_type = other RNA
tcctagtcttgccattttgtc

SEQ ID NO: 1278 - RNA, 21 nt, synthetic construct
  modified_base 1: mod_base = um
  modified_base 1^2: mod_base = OTHER; note = phosphorothioate linkage
  modified_base 2: mod_base = OTHER; note = 2'-fluorouridine
  modified_base 2^3: mod_base = OTHER; note = phosphorothioate linkage
  modified_base 3: mod_base = OTHER; note = 2'-O-methyladenosine
  modified_base 3^4: mod_base = OTHER; note = phosphorothioate linkage
  modified_base 4: mod_base = OTHER; note = 2'-fluoroguanosine
  modified_base 5: mod_base = cm
  modified_base 6: mod_base = OTHER; note = 2'-fluoroadenosine
  modified_base 7: mod_base = um
  modified_base 8: mod_base = gm
  modified_base 9: mod_base = um
  modified_base 10: mod_base = um
  modified_base 11: mod_base = gm
  modified_base 12: mod_base = OTHER; note = 2'-fluoroadenosine
  modified_base 13: mod_base = OTHER; note = 2'-O-methyladenosine
  modified_base 14: mod_base = OTHER; note = 2'-fluorocytidine
  modified_base 15: mod_base = OTHER; note = 2'-O-methyladenosine
  modified_base 16: mod_base = OTHER; note = 2'-fluorouridine
  modified_base 17: mod_base = gm
  modified_base 18: mod_base = OTHER; note = 2'-fluorocytidine
  modified_base 19: mod_base = cm
  modified_base 20: mod_base = cm
  modified_base 20^21: mod_base = OTHER; note = phosphorothioate linkage
  modified_base 21: mod_base = OTHER; note = 2'-O-methyladenosine
  source 1..21: mol_type = other RNA
ttagcatgttgaacatgccca

SEQ ID NO: 1279 - RNA, 21 nt, synthetic construct
  modified_base 1: mod_base = um
  modified_base 1^2: mod_base = OTHER; note = phosphorothioate linkage
  modified_base 2: mod_base = OTHER; note = 2'-fluoroguanosine
  modified_base 2^3: mod_base = OTHER; note = phosphorothioate linkage
  modified_base 3: mod_base = um
  modified_base 3^4: mod_base = OTHER; note = phosphorothioate linkage
  modified_base 4: mod_base = OTHER; note = 2'-fluoroadenosine
  modified_base 5: mod_base = gm
  modified_base 6: mod_base = OTHER; note = 2'-fluoroadenosine
  modified_base 7: mod_base = OTHER; note = 2'-O-methyladenosine
  modified_base 8: mod_base = um
  modified_base 9: mod_base = cm
  modified_base 10: mod_base = um
  modified_base 11: mod_base = gm
  modified_base 12: mod_base = OTHER; note = 2'-fluorouridine
  modified_base 13: mod_base = cm
  modified_base 14: mod_base = OTHER; note = 2'-fluorocytidine
  modified_base 15: mod_base = OTHER; note = 2'-O-methyladenosine
  modified_base 16: mod_base = OTHER; note = 2'-fluorocytidine
  modified_base 17: mod_base = um
  modified_base 18: mod_base = OTHER; note = 2'-fluorocytidine
  modified_base 19: mod_base = cm
  modified_base 20: mod_base = um
  modified_base 20^21: mod_base = OTHER; note = phosphorothioate linkage
  modified_base 21: mod_base = gm
  source 1..21: mol_type = other RNA
tgtagaatctgtccactcctg

SEQ ID NO: 1280 - RNA, 21 nt, synthetic construct
  modified_base 1: mod_base = um
  modified_base 1^2: mod_base = OTHER; note = phosphorothioate linkage
  modified_base 2: mod_base = OTHER; note = 2'-fluorocytidine
  modified_base 2^3: mod_base = OTHER; note = phosphorothioate linkage
  modified_base 3: mod_base = um
  modified_base 3^4: mod_base = OTHER; note = phosphorothioate linkage
  modified_base 4: mod_base = OTHER; note = 2'-fluoroadenosine
  modified_base 5: mod_base = OTHER; note = 2'-O-methyladenosine
  modified_base 6: mod_base = OTHER; note = 2'-fluoroadenosine
  modified_base 7: mod_base = OTHER; note = 2'-O-methyladenosine
  modified_base 8: mod_base = um
  modified_base 9: mod_base = um
  modified_base 10: mod_base = OTHER; note = 2'-O-methyladenosine
  modified_base 11: mod_base = gm
  modified_base 12: mod_base = OTHER; note = 2'-fluorocytidine
  modified_base 13: mod_base = cm
  modified_base 14: mod_base = OTHER; note = 2'-fluoroadenosine
  modified_base 15: mod_base = cm
  modified_base 16: mod_base = OTHER; note = 2'-fluoroadenosine
  modified_base 17: mod_base = OTHER; note = 2'-O-methyladenosine
  modified_base 18: mod_base = OTHER; note = 2'-fluoroadenosine
  modified_base 19: mod_base = um
  modified_base 20: mod_base = cm
  modified_base 20^21: mod_base = OTHER; note = phosphorothioate linkage
  modified_base 21: mod_base = cm
  source 1..21: mol_type = other RNA
tctaaaattagccacaaatcc

SEQ ID NO: 1281 - RNA, 21 nt, synthetic construct
  modified_base 1: mod_base = um
  modified_base 1^2: mod_base = OTHER; note = phosphorothioate linkage
  modified_base 2: mod_base = OTHER; note = 2'-fluoroguanosine
  modified_base 2^3: mod_base = OTHER; note = phosphorothioate linkage
  modified_base 3: mod_base = OTHER; note = 2'-O-methyladenosine
  modified_base 3^4: mod_base = OTHER; note = phosphorothioate linkage
  modified_base 4: mod_base = OTHER; note = 2'-fluorouridine
  modified_base 5: mod_base = gm
  modified_base 6: mod_base = OTHER; note = 2'-fluoroadenosine
  modified_base 7: mod_base = OTHER; note = 2'-O-methyladenosine
  modified_base 8: mod_base = cm
  modified_base 9: mod_base = OTHER; note = 2'-O-methyladenosine
  modified_base 10: mod_base = OTHER; note = 2'-O-methyladenosine
  modified_base 11: mod_base = um
  modified_base 12: mod_base = OTHER; note = 2'-fluorouridine
  modified_base 13: mod_base = gm
  modified_base 14: mod_base = OTHER; note = 2'-fluoroadenosine
  modified_base 15: mod_base = OTHER; note = 2'-O-methyladenosine
  modified_base 16: mod_base = OTHER; note = 2'-fluoroguanosine
  modified_base 17: mod_base = OTHER; note = 2'-O-methyladenosine
  modified_base 18: mod_base = OTHER; note = 2'-fluoroguanosine
  modified_base 19: mod_base = cm
  modified_base 20: mod_base = cm
  modified_base 20^21: mod_base = OTHER; note = phosphorothioate linkage
  modified_base 21: mod_base = OTHER; note = 2'-O-methyladenosine
  source 1..21: mol_type = other RNA
tgatgaacaattgaagagcca

SEQ ID NO: 1282 - RNA, 21 nt, synthetic construct
  modified_base 1: mod_base = OTHER; note = 2'-O-methyladenosine
  modified_base 1^2: mod_base = OTHER; note = phosphorothioate linkage
  modified_base 2: mod_base = OTHER; note = 2'-fluorouridine
  modified_base 2^3: mod_base = OTHER; note = phosphorothioate linkage
  modified_base 3: mod_base = OTHER; note = 2'-O-methyladenosine
  modified_base 3^4: mod_base = OTHER; note = phosphorothioate linkage
  modified_base 4: mod_base = OTHER; note = 2'-fluoroadenosine
  modified_base 5: mod_base = gm
  modified_base 6: mod_base = OTHER; note = 2'-fluorouridine
  modified_base 7: mod_base = um
  modified_base 8: mod_base = um
  modified_base 9: mod_base = gm
  modified_base 10: mod_base = gm
  modified_base 11: mod_base = um
  modified_base 12: mod_base = OTHER; note = 2'-fluorocytidine
  modified_base 13: mod_base = cm
  modified_base 14: mod_base = OTHER; note = 2'-fluorouridine
  modified_base 15: mod_base = cm
  modified_base 16: mod_base = OTHER; note = 2'-fluorocytidine
  modified_base 17: mod_base = OTHER; note = 2'-O-methyladenosine
  modified_base 18: mod_base = OTHER; note = 2'-fluorouridine
  modified_base 19: mod_base = cm
  modified_base 20: mod_base = um
  modified_base 20^21: mod_base = OTHER; note = phosphorothioate linkage
  modified_base 21: mod_base = gm
  source 1..21: mol_type = other RNA
ataagtttggtcctccatctg

SEQ ID NO: 1283 - RNA, 21 nt, synthetic construct
  modified_base 1: mod_base = um
  modified_base 1^2: mod_base = OTHER; note = phosphorothioate linkage
  modified_base 2: mod_base = OTHER; note = 2'-fluoroguanosine
  modified_base 2^3: mod_base = OTHER; note = phosphorothioate linkage
  modified_base 3: mod_base = gm
  modified_base 3^4: mod_base = OTHER; note = phosphorothioate linkage
  modified_base 4: mod_base = OTHER; note = 2'-fluorouridine
  modified_base 5: mod_base = OTHER; note = 2'-O-methyladenosine
  modified_base 6: mod_base = OTHER; note = 2'-fluorocytidine
  modified_base 7: mod_base = OTHER; note = 2'-O-methyladenosine
  modified_base 8: mod_base = um
  modified_base 9: mod_base = cm
  modified_base 10: mod_base = um
  modified_base 11: mod_base = gm
  modified_base 12: mod_base = OTHER; note = 2'-fluorouridine
  modified_base 13: mod_base = um
  modified_base 14: mod_base = OTHER; note = 2'-fluorocytidine
  modified_base 15: mod_base = OTHER; note = 2'-O-methyladenosine
  modified_base 16: mod_base = OTHER; note = 2'-fluorouridine
  modified_base 17: mod_base = cm
  modified_base 18: mod_base = OTHER; note = 2'-fluorocytidine
  modified_base 19: mod_base = um
  modified_base 20: mod_base = cm
  modified_base 20^21: mod_base = OTHER; note = phosphorothioate linkage
  modified_base 21: mod_base = OTHER; note = 2'-O-methyladenosine
  source 1..21: mol_type = other RNA
tggtacatctgttcatcctca

SEQ ID NO: 1284 - RNA, 21 nt, synthetic construct
  modified_base 1: mod_base = um
  modified_base 1^2: mod_base = OTHER; note = phosphorothioate linkage
  modified_base 2: mod_base = OTHER; note = 2'-fluorocytidine
  modified_base 2^3: mod_base = OTHER; note = phosphorothioate linkage
  modified_base 3: mod_base = OTHER; note = 2'-O-methyladenosine
  modified_base 3^4: mod_base = OTHER; note = phosphorothioate linkage
  modified_base 4: mod_base = OTHER; note = 2'-fluorocytidine
  modified_base 5: mod_base = cm
  modified_base 6: mod_base = OTHER; note = 2'-fluoroadenosine
  modified_base 7: mod_base = um
  modified_base 8: mod_base = gm
  modified_base 9: mod_base = cm
  modified_base 10: mod_base = um
  modified_base 11: mod_base = OTHER; note = 2'-O-methyladenosine
  modified_base 12: mod_base = OTHER; note = 2'-fluoroguanosine
  modified_base 13: mod_base = OTHER; note = 2'-O-methyladenosine
  modified_base 14: mod_base = OTHER; note = 2'-fluoroadenosine
  modified_base 15: mod_base = OTHER; note = 2'-O-methyladenosine
  modified_base 16: mod_base = OTHER; note = 2'-fluorouridine
  modified_base 17: mod_base = um
  modified_base 18: mod_base = OTHER; note = 2'-fluorocytidine
  modified_base 19: mod_base = cm
  modified_base 20: mod_base = OTHER; note = 2'-O-methyladenosine
  modified_base 20^21: mod_base = OTHER; note = phosphorothioate linkage
  modified_base 21: mod_base = cm
  source 1..21: mol_type = other RNA
tcaccatgctagaaattccac

SEQ ID NO: 1285 - RNA, 21 nt, synthetic construct
  modified_base 1: mod_base = um
  modified_base 1^2: mod_base = OTHER; note = phosphorothioate linkage
  modified_base 2: mod_base = OTHER; note = 2'-fluorouridine
  modified_base 2^3: mod_base = OTHER; note = phosphorothioate linkage
  modified_base 3: mod_base = um
  modified_base 3^4: mod_base = OTHER; note = phosphorothioate linkage
  modified_base 4: mod_base = OTHER; note = 2'-fluorocytidine
  modified_base 5: mod_base = OTHER; note = 2'-O-methyladenosine
  modified_base 6: mod_base = OTHER; note = 2'-fluoroadenosine
  modified_base 7: mod_base = um
  modified_base 8: mod_base = gm
  modified_base 9: mod_base = gm
  modified_base 10: mod_base = um
  modified_base 11: mod_base = gm
  modified_base 12: mod_base = OTHER; note = 2'-fluoroguanosine
  modified_base 13: mod_base = OTHER; note = 2'-O-methyladenosine
  modified_base 14: mod_base = OTHER; note = 2'-fluoroadenosine
  modified_base 15: mod_base = cm
  modified_base 16: mod_base = OTHER; note = 2'-fluoroadenosine
  modified_base 17: mod_base = gm
  modified_base 18: mod_base = OTHER; note = 2'-fluoroadenosine
  modified_base 19: mod_base = um
  modified_base 20: mod_base = cm
  modified_base 20^21: mod_base = OTHER; note = phosphorothioate linkage
  modified_base 21: mod_base = um
  source 1..21: mol_type = other RNA
tttcaatggtggaacagatct

SEQ ID NO: 1286 - RNA, 21 nt, synthetic construct
  modified_base 1: mod_base = um
  modified_base 1^2: mod_base = OTHER; note = phosphorothioate linkage
  modified_base 2: mod_base = OTHER; note = 2'-fluoroguanosine
  modified_base 2^3: mod_base = OTHER; note = phosphorothioate linkage
  modified_base 3: mod_base = OTHER; note = 2'-O-methyladenosine
  modified_base 3^4: mod_base = OTHER; note = phosphorothioate linkage
  modified_base 4: mod_base = OTHER; note = 2'-fluoroadenosine
  modified_base 5: mod_base = um
  modified_base 6: mod_base = OTHER; note = 2'-fluoroguanosine
  modified_base 7: mod_base = um
  modified_base 8: mod_base = gm
  modified_base 9: mod_base = gm
  modified_base 10: mod_base = um
  modified_base 11: mod_base = gm
  modified_base 12: mod_base = OTHER; note = 2'-fluorocytidine
  modified_base 13: mod_base = um
  modified_base 14: mod_base = OTHER; note = 2'-fluorouridine
  modified_base 15: mod_base = OTHER; note = 2'-O-methyladenosine
  modified_base 16: mod_base = OTHER; note = 2'-fluorouridine
  modified_base 17: mod_base = gm
  modified_base 18: mod_base = OTHER; note = 2'-fluoroguanosine
  modified_base 19: mod_base = cm
  modified_base 20: mod_base = OTHER; note = 2'-O-methyladenosine
  modified_base 20^21: mod_base = OTHER; note = phosphorothioate linkage
  modified_base 21: mod_base = um
  source 1..21: mol_type = other RNA
tgaatgtggtgcttatggcat

SEQ ID NO: 1287 - RNA, 21 nt, synthetic construct
  modified_base 1: mod_base = um
  modified_base 1^2: mod_base = OTHER; note = phosphorothioate linkage
  modified_base 2: mod_base = OTHER; note = 2'-fluoroadenosine
  modified_base 2^3: mod_base = OTHER; note = phosphorothioate linkage
  modified_base 3: mod_base = cm
  modified_base 3^4: mod_base = OTHER; note = phosphorothioate linkage
  modified_base 4: mod_base = OTHER; note = 2'-fluoroguanosine
  modified_base 5: mod_base = OTHER; note = 2'-O-methyladenosine
  modified_base 6: mod_base = OTHER; note = 2'-fluoroadenosine
  modified_base 7: mod_base = OTHER; note = 2'-O-methyladenosine
  modified_base 8: mod_base = cm
  modified_base 9: mod_base = cm
  modified_base 10: mod_base = um
  modified_base 11: mod_base = cm
  modified_base 12: mod_base = OTHER; note = 2'-fluorouridine
  modified_base 13: mod_base = OTHER; note = 2'-O-methyladenosine
  modified_base 14: mod_base = OTHER; note = 2'-fluoroadenosine
  modified_base 15: mod_base = um
  modified_base 16: mod_base = OTHER; note = 2'-fluorocytidine
  modified_base 17: mod_base = um
  modified_base 18: mod_base = OTHER; note = 2'-fluoroguanosine
  modified_base 19: mod_base = cm
  modified_base 20: mod_base = OTHER; note = 2'-O-methyladenosine
  modified_base 20^21: mod_base = OTHER; note = phosphorothioate linkage
  modified_base 21: mod_base = cm
  source 1..21: mol_type = other RNA
tacgaaacctctaatctgcac

SEQ ID NO: 1288 - RNA, 21 nt, synthetic construct
  modified_base 1: mod_base = OTHER; note = 2'-O-methyladenosine
  modified_base 1^2: mod_base = OTHER; note = phosphorothioate linkage
  modified_base 2: mod_base = OTHER; note = 2'-fluoroguanosine
  modified_base 2^3: mod_base = OTHER; note = phosphorothioate linkage
  modified_base 3: mod_base = OTHER; note = 2'-O-methyladenosine
  modified_base 3^4: mod_base = OTHER; note = phosphorothioate linkage
  modified_base 4: mod_base = OTHER; note = 2'-fluorocytidine
  modified_base 5: mod_base = um
  modified_base 6: mod_base = OTHER; note = 2'-fluoroguanosine
  modified_base 7: mod_base = um
  modified_base 8: mod_base = um
  modified_base 9: mod_base = cm
  modified_base 10: mod_base = OTHER; note = 2'-O-methyladenosine
  modified_base 11: mod_base = OTHER; note = 2'-O-methyladenosine
  modified_base 12: mod_base = OTHER; note = 2'-fluoroguanosine
  modified_base 13: mod_base = cm
  modified_base 14: mod_base = OTHER; note = 2'-fluorouridine
  modified_base 15: mod_base = um
  modified_base 16: mod_base = OTHER; note = 2'-fluorouridine
  modified_base 17: mod_base = um
  modified_base 18: mod_base = OTHER; note = 2'-fluorocytidine
  modified_base 19: mod_base = gm
  modified_base 20: mod_base = cm
  modified_base 20^21: mod_base = OTHER; note = phosphorothioate linkage
  modified_base 21: mod_base = OTHER; note = 2'-O-methyladenosine
  source 1..21: mol_type = other RNA
agactgttcaagcttttcgca

SEQ ID NO: 1289 - RNA, 21 nt, synthetic construct
  modified_base 1: mod_base = um
  modified_base 1^2: mod_base = OTHER; note = phosphorothioate linkage
  modified_base 2: mod_base = OTHER; note = 2'-fluorocytidine
  modified_base 2^3: mod_base = OTHER; note = phosphorothioate linkage
  modified_base 3: mod_base = OTHER; note = 2'-O-methyladenosine
  modified_base 3^4: mod_base = OTHER; note = phosphorothioate linkage
  modified_base 4: mod_base = OTHER; note = 2'-fluorouridine
  modified_base 5: mod_base = cm
  modified_base 6: mod_base = OTHER; note = 2'-fluoroadenosine
  modified_base 7: mod_base = um
  modified_base 8: mod_base = cm
  modified_base 9: mod_base = OTHER; note = 2'-O-methyladenosine
  modified_base 10: mod_base = um
  modified_base 11: mod_base = cm
  modified_base 12: mod_base = OTHER; note = 2'-fluorocytidine
  modified_base 13: mod_base = cm
  modified_base 14: mod_base = OTHER; note = 2'-fluoroadenosine
  modified_base 15: mod_base = gm
  modified_base 16: mod_base = OTHER; note = 2'-fluoroguanosine
  modified_base 17: mod_base = OTHER; note = 2'-O-methyladenosine
  modified_base 18: mod_base = OTHER; note = 2'-fluorocytidine
  modified_base 19: mod_base = um
  modified_base 20: mod_base = cm
  modified_base 20^21: mod_base = OTHER; note = phosphorothioate linkage
  modified_base 21: mod_base = OTHER; note = 2'-O-methyladenosine
  source 1..21: mol_type = other RNA
tcatcatcatcccaggactca

SEQ ID NO: 1290 - RNA, 21 nt, synthetic construct
  modified_base 1: mod_base = um
  modified_base 1^2: mod_base = OTHER; note = phosphorothioate linkage
  modified_base 2: mod_base = OTHER; note = 2'-fluorocytidine
  modified_base 2^3: mod_base = OTHER; note = phosphorothioate linkage
  modified_base 3: mod_base = OTHER; note = 2'-O-methyladenosine
  modified_base 3^4: mod_base = OTHER; note = phosphorothioate linkage
  modified_base 4: mod_base = OTHER; note = 2'-fluoroadenosine
  modified_base 5: mod_base = gm
  modified_base 6: mod_base = OTHER; note = 2'-fluoroadenosine
  modified_base 7: mod_base = um
  modified_base 8: mod_base = um
  modified_base 9: mod_base = cm
  modified_base 10: mod_base = OTHER; note = 2'-O-methyladenosine
  modified_base 11: mod_base = gm
  modified_base 12: mod_base = OTHER; note = 2'-fluorouridine
  modified_base 13: mod_base = OTHER; note = 2'-O-methyladenosine
  modified_base 14: mod_base = OTHER; note = 2'-fluorouridine
  modified_base 15: mod_base = cm
  modified_base 16: mod_base = OTHER; note = 2'-fluoroguanosine
  modified_base 17: mod_base = OTHER; note = 2'-O-methyladenosine
  modified_base 18: mod_base = OTHER; note = 2'-fluoroguanosine
  modified_base 19: mod_base = OTHER; note = 2'-O-methyladenosine
  modified_base 20: mod_base = cm
  modified_base 20^21: mod_base = OTHER; note = phosphorothioate linkage
  modified_base 21: mod_base = um
  source 1..21: mol_type = other RNA
tcaagattcagtatcgagact

SEQ ID NO: 1291 - RNA, 21 nt, synthetic construct
  modified_base 1: mod_base = um
  modified_base 1^2: mod_base = OTHER; note = phosphorothioate linkage
  modified_base 2: mod_base = OTHER; note = 2'-fluorocytidine
  modified_base 2^3: mod_base = OTHER; note = phosphorothioate linkage
  modified_base 3: mod_base = OTHER; note = 2'-O-methyladenosine
  modified_base 3^4: mod_base = OTHER; note = phosphorothioate linkage
  modified_base 4: mod_base = OTHER; note = 2'-fluorouridine
  modified_base 5: mod_base = gm
  modified_base 6: mod_base = OTHER; note = 2'-fluorouridine
  modified_base 7: mod_base = um
  modified_base 8: mod_base = gm
  modified_base 9: mod_base = um
  modified_base 10: mod_base = um
  modified_base 11: mod_base = cm
  modified_base 12: mod_base = OTHER; note = 2'-fluorouridine
  modified_base 13: mod_base = um
  modified_base 14: mod_base = OTHER; note = 2'-fluorouridine
  modified_base 15: mod_base = OTHER; note = 2'-O-methyladenosine
  modified_base 16: mod_base = OTHER; note = 2'-fluorouridine
  modified_base 17: mod_base = cm
  modified_base 18: mod_base = OTHER; note = 2'-fluoroadenosine
  modified_base 19: mod_base = cm
  modified_base 20: mod_base = um
  modified_base 20^21: mod_base = OTHER; note = phosphorothioate linkage
  modified_base 21: mod_base = gm
  source 1..21: mol_type = other RNA
tcatgttgttctttatcactg

SEQ ID NO: 1292 - RNA, 21 nt, synthetic construct
  modified_base 1: mod_base = um
  modified_base 1^2: mod_base = OTHER; note = phosphorothioate linkage
  modified_base 2: mod_base = OTHER; note = 2'-fluoroadenosine
  modified_base 2^3: mod_base = OTHER; note = phosphorothioate linkage
  modified_base 3: mod_base = gm
  modified_base 3^4: mod_base = OTHER; note = phosphorothioate linkage
  modified_base 4: mod_base = OTHER; note = 2'-fluoroadenosine
  modified_base 5: mod_base = OTHER; note = 2'-O-methyladenosine
  modified_base 6: mod_base = OTHER; note = 2'-fluorocytidine
  modified_base 7: mod_base = um
  modified_base 8: mod_base = cm
  modified_base 9: mod_base = um
  modified_base 10: mod_base = um
  modified_base 11: mod_base = cm
  modified_base 12: mod_base = OTHER; note = 2'-fluorouridine
  modified_base 13: mod_base = um
  modified_base 14: mod_base = OTHER; note = 2'-fluorouridine
  modified_base 15: mod_base = cm
  modified_base 16: mod_base = OTHER; note = 2'-fluorouridine
  modified_base 17: mod_base = um
  modified_base 18: mod_base = OTHER; note = 2'-fluoroguanosine
  modified_base 19: mod_base = OTHER; note = 2'-O-methyladenosine
  modified_base 20: mod_base = um
  modified_base 20^21: mod_base = OTHER; note = phosphorothioate linkage
  modified_base 21: mod_base = cm
  source 1..21: mol_type = other RNA
tagaactcttctttcttgatc

SEQ ID NO: 1293 - RNA, 21 nt, synthetic construct
  modified_base 1: mod_base = um
  modified_base 1^2: mod_base = OTHER; note = phosphorothioate linkage
  modified_base 2: mod_base = OTHER; note = 2'-fluoroadenosine
  modified_base 2^3: mod_base = OTHER; note = phosphorothioate linkage
  modified_base 3: mod_base = OTHER; note = 2'-O-methyladenosine
  modified_base 3^4: mod_base = OTHER; note = phosphorothioate linkage
  modified_base 4: mod_base = OTHER; note = 2'-fluorocytidine
  modified_base 5: mod_base = OTHER; note = 2'-O-methyladenosine
  modified_base 6: mod_base = OTHER; note = 2'-fluoroguanosine
  modified_base 7: mod_base = OTHER; note = 2'-O-methyladenosine
  modified_base 8: mod_base = um
  modified_base 9: mod_base = cm
  modified_base 10: mod_base = um
  modified_base 11: mod_base = um
  modified_base 12: mod_base = OTHER; note = 2'-fluorocytidine
  modified_base 13: mod_base = OTHER; note = 2'-O-methyladenosine
  modified_base 14: mod_base = OTHER; note = 2'-fluorouridine
  modified_base 15: mod_base = gm
  modified_base 16: mod_base = OTHER; note = 2'-fluoroadenosine
  modified_base 17: mod_base = um
  modified_base 18: mod_base = OTHER; note = 2'-fluorocytidine
  modified_base 19: mod_base = um
  modified_base 20: mod_base = cm
  modified_base 20^21: mod_base = OTHER; note = phosphorothioate linkage
  modified_base 21: mod_base = cm
  source 1..21: mol_type = other RNA
taacagatcttcatgatctcc

SEQ ID NO: 1294 - RNA, 21 nt, synthetic construct
  modified_base 1: mod_base = um
  modified_base 1^2: mod_base = OTHER; note = phosphorothioate linkage
  modified_base 2: mod_base = OTHER; note = 2'-fluorouridine
  modified_base 2^3: mod_base = OTHER; note = phosphorothioate linkage
  modified_base 3: mod_base = gm
  modified_base 3^4: mod_base = OTHER; note = phosphorothioate linkage
  modified_base 4: mod_base = OTHER; note = 2'-fluoroadenosine
  modified_base 5: mod_base = gm
  modified_base 6: mod_base = OTHER; note = 2'-fluorouridine
  modified_base 7: mod_base = um
  modified_base 8: mod_base = cm
  modified_base 9: mod_base = um
  modified_base 10: mod_base = um
  modified_base 11: mod_base = cm
  modified_base 12: mod_base = OTHER; note = 2'-fluoroadenosine
  modified_base 13: mod_base = OTHER; note = 2'-O-methyladenosine
  modified_base 14: mod_base = OTHER; note = 2'-fluorouridine
  modified_base 15: mod_base = gm
  modified_base 16: mod_base = OTHER; note = 2'-fluoroguanosine
  modified_base 17: mod_base = um
  modified_base 18: mod_base = OTHER; note = 2'-fluoroguanosine
  modified_base 19: mod_base = gm
  modified_base 20: mod_base = OTHER; note = 2'-O-methyladenosine
  modified_base 20^21: mod_base = OTHER; note = phosphorothioate linkage
  modified_base 21: mod_base = cm
  source 1..21: mol_type = other RNA
ttgagttcttcaatggtggac

SEQ ID NO: 1295 - RNA, 21 nt, synthetic construct
  modified_base 1: mod_base = OTHER; note = 5'-cyclopropyl phosphonate-2'-O-methyluridine
  modified_base 1^2: mod_base = OTHER; note = phosphorothioate linkage
  modified_base 2: mod_base = OTHER; note = 2'-fluorouridine
  modified_base 2^3: mod_base = OTHER; note = phosphorothioate linkage
  modified_base 3: mod_base = cm
  modified_base 3^4: mod_base = OTHER; note = phosphorothioate linkage
  modified_base 4: mod_base = OTHER; note = 2'-fluorocytidine
  modified_base 5: mod_base = OTHER; note = 2'-O-methyladenosine
  modified_base 6: mod_base = OTHER; note = 2'-fluorouridine
  modified_base 7: mod_base = um
  modified_base 8: mod_base = gm
  modified_base 9: mod_base = um
  modified_base 10: mod_base = um
  modified_base 11: mod_base = um
  modified_base 12: mod_base = OTHER; note = 2'-fluorocytidine
  modified_base 13: mod_base = OTHER; note = 2'-O-methyladenosine
  modified_base 14: mod_base = OTHER; note = 2'-fluoroadenosine
  modified_base 15: mod_base = gm
  modified_base 16: mod_base = OTHER; note = 2'-fluoroguanosine
  modified_base 17: mod_base = cm
  modified_base 18: mod_base = OTHER; note = 2'-fluoroadenosine
  modified_base 19: mod_base = um
  modified_base 20: mod_base = gm
  modified_base 20^21: mod_base = OTHER; note = phosphorothioate linkage
  modified_base 21: mod_base = OTHER; note = 2'-O-methyladenosine
  source 1..21: mol_type = other RNA
ttccattgtttcaaggcatga

SEQ ID NO: 1296 - RNA, 21 nt, synthetic construct
  modified_base 1: mod_base = OTHER; note = 5'-cyclopropyl phosphonate-2'-O-methyladenosine
  modified_base 1^2: mod_base = OTHER; note = phosphorothioate linkage
  modified_base 2: mod_base = OTHER; note = 2'-fluoroguanosine
  modified_base 2^3: mod_base = OTHER; note = phosphorothioate linkage
  modified_base 3: mod_base = OTHER; note = 2'-O-methyladenosine
  modified_base 3^4: mod_base = OTHER; note = phosphorothioate linkage
  modified_base 4: mod_base = OTHER; note = 2'-fluorocytidine
  modified_base 5: mod_base = um
  modified_base 6: mod_base = OTHER; note = 2'-fluoroguanosine
  modified_base 7: mod_base = um
  modified_base 8: mod_base = um
  modified_base 9: mod_base = cm
  modified_base 10: mod_base = OTHER; note = 2'-O-methyladenosine
  modified_base 11: mod_base = OTHER; note = 2'-O-methyladenosine
  modified_base 12: mod_base = OTHER; note = 2'-fluoroguanosine
  modified_base 13: mod_base = cm
  modified_base 14: mod_base = OTHER; note = 2'-fluorouridine
  modified_base 15: mod_base = um
  modified_base 16: mod_base = OTHER; note = 2'-fluorouridine
  modified_base 17: mod_base = um
  modified_base 18: mod_base = OTHER; note = 2'-fluorocytidine
  modified_base 19: mod_base = gm
  modified_base 20: mod_base = cm
  modified_base 20^21: mod_base = OTHER; note = phosphorothioate linkage
  modified_base 21: mod_base = OTHER; note = 2'-O-methyladenosine
  source 1..21: mol_type = other RNA
agactgttcaagcttttcgca

SEQ ID NO: 1297 - RNA, 21 nt, synthetic construct
  modified_base 1: mod_base = OTHER; note = 5'-cyclopropyl phosphonate-2'-O-methyluridine
  modified_base 1^2: mod_base = OTHER; note = phosphorothioate linkage
  modified_base 2: mod_base = OTHER; note = 2'-fluoroadenosine
  modified_base 2^3: mod_base = OTHER; note = phosphorothioate linkage
  modified_base 3: mod_base = cm
  modified_base 3^4: mod_base = OTHER; note = phosphorothioate linkage
  modified_base 4: mod_base = OTHER; note = 2'-fluoroguanosine
  modified_base 5: mod_base = OTHER; note = 2'-O-methyladenosine
  modified_base 6: mod_base = OTHER; note = 2'-fluoroadenosine
  modified_base 7: mod_base = OTHER; note = 2'-O-methyladenosine
  modified_base 8: mod_base = cm
  modified_base 9: mod_base = cm
  modified_base 10: mod_base = um
  modified_base 11: mod_base = cm
  modified_base 12: mod_base = OTHER; note = 2'-fluorouridine
  modified_base 13: mod_base = OTHER; note = 2'-O-methyladenosine
  modified_base 14: mod_base = OTHER; note = 2'-fluoroadenosine
  modified_base 15: mod_base = um
  modified_base 16: mod_base = OTHER; note = 2'-fluorocytidine
  modified_base 17: mod_base = um
  modified_base 18: mod_base = OTHER; note = 2'-fluoroguanosine
  modified_base 19: mod_base = cm
  modified_base 20: mod_base = OTHER; note = 2'-O-methyladenosine
  modified_base 20^21: mod_base = OTHER; note = phosphorothioate linkage
  modified_base 21: mod_base = cm
  source 1..21: mol_type = other RNA
tacgaaacctctaatctgcac

SEQ ID NO: 1298 - RNA, 21 nt, synthetic construct
  modified_base 1: mod_base = OTHER; note = 5'-cyclopropyl phosphonate-2'-O-methyluridine
  modified_base 1^2: mod_base = OTHER; note = phosphorothioate linkage
  modified_base 2: mod_base = OTHER; note = 2'-fluorouridine
  modified_base 2^3: mod_base = OTHER; note = phosphorothioate linkage
  modified_base 3: mod_base = um
  modified_base 3^4: mod_base = OTHER; note = phosphorothioate linkage
  modified_base 4: mod_base = OTHER; note = 2'-fluorocytidine
  modified_base 5: mod_base = OTHER; note = 2'-O-methyladenosine
  modified_base 6: mod_base = OTHER; note = 2'-fluoroadenosine
  modified_base 7: mod_base = um
  modified_base 8: mod_base = gm
  modified_base 9: mod_base = gm
  modified_base 10: mod_base = um
  modified_base 11: mod_base = gm
  modified_base 12: mod_base = OTHER; note = 2'-fluoroguanosine
  modified_base 13: mod_base = OTHER; note = 2'-O-methyladenosine
  modified_base 14: mod_base = OTHER; note = 2'-fluoroadenosine
  modified_base 15: mod_base = cm
  modified_base 16: mod_base = OTHER; note = 2'-fluoroadenosine
  modified_base 17: mod_base = gm
  modified_base 18: mod_base = OTHER; note = 2'-fluoroadenosine
  modified_base 19: mod_base = um
  modified_base 20: mod_base = cm
  modified_base 20^21: mod_base = OTHER; note = phosphorothioate linkage
  modified_base 21: mod_base = um
  source 1..21: mol_type = other RNA
tttcaatggtggaacagatct

SEQ ID NO: 1299 - RNA, 21 nt, synthetic construct
  modified_base 1: mod_base = OTHER; note = 5'-cyclopropyl phosphonate-2'-O-methyluridine
  modified_base 1^2: mod_base = OTHER; note = phosphorothioate linkage
  modified_base 2: mod_base = OTHER; note = 2'-fluoroadenosine
  modified_base 2^3: mod_base = OTHER; note = phosphorothioate linkage
  modified_base 3: mod_base = OTHER; note = 2'-O-methyladenosine
  modified_base 3^4: mod_base = OTHER; note = phosphorothioate linkage
  modified_base 4: mod_base = OTHER; note = 2'-fluorocytidine
  modified_base 5: mod_base = OTHER; note = 2'-O-methyladenosine
  modified_base 6: mod_base = OTHER; note = 2'-fluoroguanosine
  modified_base 7: mod_base = OTHER; note = 2'-O-methyladenosine
  modified_base 8: mod_base = um
  modified_base 9: mod_base = cm
  modified_base 10: mod_base = um
  modified_base 11: mod_base = um
  modified_base 12: mod_base = OTHER; note = 2'-fluorocytidine
  modified_base 13: mod_base = OTHER; note = 2'-O-methyladenosine
  modified_base 14: mod_base = OTHER; note = 2'-fluorouridine
  modified_base 15: mod_base = gm
  modified_base 16: mod_base = OTHER; note = 2'-fluoroadenosine
  modified_base 17: mod_base = um
  modified_base 18: mod_base = OTHER; note = 2'-fluorocytidine
  modified_base 19: mod_base = um
  modified_base 20: mod_base = cm
  modified_base 20^21: mod_base = OTHER; note = phosphorothioate linkage
  modified_base 21: mod_base = cm
  source 1..21: mol_type = other RNA
taacagatcttcatgatctcc

SEQ ID NO: 1300 - RNA, 21 nt, synthetic construct
  modified_base 1: mod_base = OTHER; note = 5'-cyclopropyl phosphonate-2'-O-methyluridine
  modified_base 1^2: mod_base = OTHER; note = phosphorothioate linkage
  modified_base 2: mod_base = OTHER; note = 2'-fluoroadenosine
  modified_base 2^3: mod_base = OTHER; note = phosphorothioate linkage
  modified_base 3: mod_base = gm
  modified_base 3^4: mod_base = OTHER; note = phosphorothioate linkage
  modified_base 4: mod_base = OTHER; note = 2'-fluorouridine
  modified_base 5: mod_base = OTHER; note = 2'-O-methyladenosine
  modified_base 6: mod_base = OTHER; note = 2'-fluorouridine
  modified_base 7: mod_base = um
  modified_base 8: mod_base = gm
  modified_base 9: mod_base = gm
  modified_base 10: mod_base = um
  modified_base 11: mod_base = gm
  modified_base 12: mod_base = OTHER; note = 2'-fluorouridine
  modified_base 13: mod_base = gm
  modified_base 14: mod_base = OTHER; note = 2'-fluorouridine
  modified_base 15: mod_base = um
  modified_base 16: mod_base = OTHER; note = 2'-fluorocytidine
  modified_base 17: mod_base = um
  modified_base 18: mod_base = OTHER; note = 2'-fluoroguanosine
  modified_base 19: mod_base = um
  modified_base 20: mod_base = um
  modified_base 20^21: mod_base = OTHER; note = phosphorothioate linkage
  modified_base 21: mod_base = cm
  source 1..21: mol_type = other RNA
tagtattggtgtgttctgttc

SEQ ID NO: 1301 - RNA, 21 nt, synthetic construct
  modified_base 1: mod_base = OTHER; note = 5'-cyclopropyl phosphonate-2'-O-methyluridine
  modified_base 1^2: mod_base = OTHER; note = phosphorothioate linkage
  modified_base 2: mod_base = OTHER; note = 2'-fluoroguanosine
  modified_base 2^3: mod_base = OTHER; note = phosphorothioate linkage
  modified_base 3: mod_base = OTHER; note = 2'-O-methyladenosine
  modified_base 3^4: mod_base = OTHER; note = phosphorothioate linkage
  modified_base 4: mod_base = OTHER; note = 2'-fluorouridine
  modified_base 5: mod_base = gm
  modified_base 6: mod_base = OTHER; note = 2'-fluoroadenosine
  modified_base 7: mod_base = OTHER; note = 2'-O-methyladenosine
  modified_base 8: mod_base = cm
  modified_base 9: mod_base = OTHER; note = 2'-O-methyladenosine
  modified_base 10: mod_base = OTHER; note = 2'-O-methyladenosine
  modified_base 11: mod_base = um
  modified_base 12: mod_base = OTHER; note = 2'-fluorouridine
  modified_base 13: mod_base = gm
  modified_base 14: mod_base = OTHER; note = 2'-fluoroadenosine
  modified_base 15: mod_base = OTHER; note = 2'-O-methyladenosine
  modified_base 16: mod_base = OTHER; note = 2'-fluoroguanosine
  modified_base 17: mod_base = OTHER; note = 2'-O-methyladenosine
  modified_base 18: mod_base = OTHER; note = 2'-fluoroguanosine
  modified_base 19: mod_base = cm
  modified_base 20: mod_base = cm
  modified_base 20^21: mod_base = OTHER; note = phosphorothioate linkage
  modified_base 21: mod_base = OTHER; note = 2'-O-methyladenosine
  source 1..21: mol_type = other RNA
tgatgaacaattgaagagcca

SEQ ID NO: 1302 - RNA, 21 nt, synthetic construct
  modified_base 1: mod_base = um
  modified_base 1^2: mod_base = OTHER; note = phosphorothioate linkage
  modified_base 2: mod_base = OTHER; note = 2'-fluoroguanosine
  modified_base 2^3: mod_base = OTHER; note = phosphorothioate linkage
  modified_base 3: mod_base = gm
  modified_base 3^4: mod_base = OTHER; note = phosphorothioate linkage
  modified_base 4: mod_base = OTHER; note = 2'-fluorouridine
  modified_base 5: mod_base = cm
  modified_base 6: mod_base = OTHER; note = 2'-fluorouridine
  modified_base 7: mod_base = um
  modified_base 8: mod_base = OTHER; note = 2'-O-methyladenosine
  modified_base 9: mod_base = gm
  modified_base 10: mod_base = um
  modified_base 11: mod_base = gm
  modified_base 12: mod_base = OTHER; note = 2'-fluoroadenosine
  modified_base 13: mod_base = gm
  modified_base 14: mod_base = OTHER; note = 2'-fluorouridine
  modified_base 15: mod_base = OTHER; note = 2'-O-methyladenosine
  modified_base 16: mod_base = OTHER; note = 2'-fluorouridine
  modified_base 17: mod_base = cm
  modified_base 18: mod_base = OTHER; note = 2'-fluorouridine
  modified_base 19: mod_base = cm
  modified_base 20: mod_base = gm
  modified_base 20^21: mod_base = OTHER; note = phosphorothioate linkage
  modified_base 21: mod_base = cm
  source 1..21: mol_type = other RNA
tggtcttagtgagtatctcgc

SEQ ID NO: 1303 - RNA, 21 nt, synthetic construct
  modified_base 1: mod_base = um
  modified_base 1^2: mod_base = OTHER; note = phosphorothioate linkage
  modified_base 2: mod_base = OTHER; note = 2'-fluorocytidine
  modified_base 2^3: mod_base = OTHER; note = phosphorothioate linkage
  modified_base 3: mod_base = OTHER; note = 2'-O-methyladenosine
  modified_base 3^4: mod_base = OTHER; note = phosphorothioate linkage
  modified_base 4: mod_base = OTHER; note = 2'-fluorouridine
  modified_base 5: mod_base = gm
  modified_base 6: mod_base = OTHER; note = 2'-fluorouridine
  modified_base 7: mod_base = um
  modified_base 8: mod_base = um
  modified_base 9: mod_base = cm
  modified_base 10: mod_base = OTHER; note = 2'-O-methyladenosine
  modified_base 11: mod_base = OTHER; note = 2'-O-methyladenosine
  modified_base 12: mod_base = OTHER; note = 2'-fluorocytidine
  modified_base 13: mod_base = cm
  modified_base 14: mod_base = OTHER; note = 2'-fluorouridine
  modified_base 15: mod_base = um
  modified_base 16: mod_base = OTHER; note = 2'-fluorouridine
  modified_base 17: mod_base = cm
  modified_base 18: mod_base = OTHER; note = 2'-fluoroguanosine
  modified_base 19: mod_base = OTHER; note = 2'-O-methyladenosine
  modified_base 20: mod_base = cm
  modified_base 20^21: mod_base = OTHER; note = phosphorothioate linkage
  modified_base 21: mod_base = cm
  source 1..21: mol_type = other RNA
tcatgtttcaacctttcgacc

SEQ ID NO: 1304 - RNA, 21 nt, synthetic construct
  modified_base 1: mod_base = um
  modified_base 1^2: mod_base = OTHER; note = phosphorothioate linkage
  modified_base 2: mod_base = OTHER; note = 2'-fluorouridine
  modified_base 2^3: mod_base = OTHER; note = phosphorothioate linkage
  modified_base 3: mod_base = OTHER; note = 2'-O-methyladenosine
  modified_base 3^4: mod_base = OTHER; note = phosphorothioate linkage
  modified_base 4: mod_base = OTHER; note = 2'-fluoroguanosine
  modified_base 5: mod_base = cm
  modified_base 6: mod_base = OTHER; note = 2'-fluoroadenosine
  modified_base 7: mod_base = um
  modified_base 8: mod_base = gm
  modified_base 9: mod_base = um
  modified_base 10: mod_base = OTHER; note = 2'-O-methyladenosine
  modified_base 11: mod_base = cm
  modified_base 12: mod_base = OTHER; note = 2'-fluoroguanosine
  modified_base 13: mod_base = cm
  modified_base 14: mod_base = OTHER; note = 2'-fluorocytidine
  modified_base 15: mod_base = OTHER; note = 2'-O-methyladenosine
  modified_base 16: mod_base = OTHER; note = 2'-fluorocytidine
  modified_base 17: mod_base = cm
  modified_base 18: mod_base = OTHER; note = 2'-fluoroadenosine
  modified_base 19: mod_base = um
  modified_base 20: mod_base = cm
  modified_base 20^21: mod_base = OTHER; note = phosphorothioate linkage
  modified_base 21: mod_base = OTHER; note = 2'-O-methyladenosine
  source 1..21: mol_type = other RNA
ttagcatgtacgccaccatca

SEQ ID NO: 1305 - RNA, 21 nt, synthetic construct
  modified_base 1: mod_base = um
  modified_base 1^2: mod_base = OTHER; note = phosphorothioate linkage
  modified_base 2: mod_base = OTHER; note = 2'-fluorouridine
  modified_base 2^3: mod_base = OTHER; note = phosphorothioate linkage
  modified_base 3: mod_base = OTHER; note = 2'-O-methyladenosine
  modified_base 3^4: mod_base = OTHER; note = phosphorothioate linkage
  modified_base 4: mod_base = OTHER; note = 2'-fluorocytidine
  modified_base 5: mod_base = um
  modified_base 6: mod_base = OTHER; note = 2'-fluoroadenosine
  modified_base 7: mod_base = um
  modified_base 8: mod_base = gm
  modified_base 9: mod_base = um
  modified_base 10: mod_base = um
  modified_base 11: mod_base = um
  modified_base 12: mod_base = OTHER; note = 2'-fluorocytidine
  modified_base 13: mod_base = um
  modified_base 14: mod_base = OTHER; note = 2'-fluoroadenosine
  modified_base 15: mod_base = gm
  modified_base 16: mod_base = OTHER; note = 2'-fluorocytidine
  modified_base 17: mod_base = OTHER; note = 2'-O-methyladenosine
  modified_base 18: mod_base = OTHER; note = 2'-fluoroguanosine
  modified_base 19: mod_base = cm
  modified_base 20: mod_base = gm
  modified_base 20^21: mod_base = OTHER; note = phosphorothioate linkage
  modified_base 21: mod_base = OTHER; note = 2'-O-methyladenosine
  source 1..21: mol_type = other RNA
ttactatgtttctagcagcga

SEQ ID NO: 1306 - RNA, 21 nt, synthetic construct
  modified_base 1: mod_base = um
  modified_base 1^2: mod_base = OTHER; note = phosphorothioate linkage
  modified_base 2: mod_base = OTHER; note = 2'-fluoroadenosine
  modified_base 2^3: mod_base = OTHER; note = phosphorothioate linkage
  modified_base 3: mod_base = cm
  modified_base 3^4: mod_base = OTHER; note = phosphorothioate linkage
  modified_base 4: mod_base = OTHER; note = 2'-fluorouridine
  modified_base 5: mod_base = gm
  modified_base 6: mod_base = OTHER; note = 2'-fluoroadenosine
  modified_base 7: mod_base = um
  modified_base 8: mod_base = gm
  modified_base 9: mod_base = OTHER; note = 2'-O-methyladenosine
  modified_base 10: mod_base = um
  modified_base 11: mod_base = cm
  modified_base 12: mod_base = OTHER; note = 2'-fluorocytidine
  modified_base 13: mod_base = gm
  modified_base 14: mod_base = OTHER; note = 2'-fluorocytidine
  modified_base 15: mod_base = um
  modified_base 16: mod_base = OTHER; note = 2'-fluorouridine
  modified_base 17: mod_base = gm
  modified_base 18: mod_base = OTHER; note = 2'-fluorouridine
  modified_base 19: mod_base = cm
  modified_base 20: mod_base = cm
  modified_base 20^21: mod_base = OTHER; note = phosphorothioate linkage
  modified_base 21: mod_base = um
  source 1..21: mol_type = other RNA
tactgatgatccgcttgtcct

SEQ ID NO: 1307 - RNA, 21 nt, synthetic construct
  modified_base 1: mod_base = um
  modified_base 1^2: mod_base = OTHER; note = phosphorothioate linkage
  modified_base 2: mod_base = OTHER; note = 2'-fluorocytidine
  modified_base 2^3: mod_base = OTHER; note = phosphorothioate linkage
  modified_base 3: mod_base = um
  modified_base 3^4: mod_base = OTHER; note = phosphorothioate linkage
  modified_base 4: mod_base = OTHER; note = 2'-fluorouridine
  modified_base 5: mod_base = gm
  modified_base 6: mod_base = OTHER; note = 2'-fluoroadenosine
  modified_base 7: mod_base = um
  modified_base 8: mod_base = cm
  modified_base 9: mod_base = OTHER; note = 2'-O-methyladenosine
  modified_base 10: mod_base = um
  modified_base 11: mod_base = gm
  modified_base 12: mod_base = OTHER; note = 2'-fluorocytidine
  modified_base 13: mod_base = OTHER; note = 2'-O-methyladenosine
  modified_base 14: mod_base = OTHER; note = 2'-fluoroadenosine
  modified_base 15: mod_base = um
  modified_base 16: mod_base = OTHER; note = 2'-fluorocytidine
  modified_base 17: mod_base = cm
  modified_base 18: mod_base = OTHER; note = 2'-fluorouridine
  modified_base 19: mod_base = cm
  modified_base 20: mod_base = cm
  modified_base 20^21: mod_base = OTHER; note = phosphorothioate linkage
  modified_base 21: mod_base = um
  source 1..21: mol_type = other RNA
tcttgatcatgcaatcctcct

SEQ ID NO: 1308 - RNA, 21 nt, synthetic construct
  modified_base 1: mod_base = um
  modified_base 1^2: mod_base = OTHER; note = phosphorothioate linkage
  modified_base 2: mod_base = OTHER; note = 2'-fluoroguanosine
  modified_base 2^3: mod_base = OTHER; note = phosphorothioate linkage
  modified_base 3: mod_base = um
  modified_base 3^4: mod_base = OTHER; note = phosphorothioate linkage
  modified_base 4: mod_base = OTHER; note = 2'-fluorocytidine
  modified_base 5: mod_base = OTHER; note = 2'-O-methyladenosine
  modified_base 6: mod_base = OTHER; note = 2'-fluoroadenosine
  modified_base 7: mod_base = um
  modified_base 8: mod_base = OTHER; note = 2'-O-methyladenosine
  modified_base 9: mod_base = cm
  modified_base 10: mod_base = um
  modified_base 11: mod_base = cm
  modified_base 12: mod_base = OTHER; note = 2'-fluoroadenosine
  modified_base 13: mod_base = cm
  modified_base 14: mod_base = OTHER; note = 2'-fluorouridine
  modified_base 15: mod_base = OTHER; note = 2'-O-methyladenosine
  modified_base 16: mod_base = OTHER; note = 2'-fluorocytidine
  modified_base 17: mod_base = cm
  modified_base 18: mod_base = OTHER; note = 2'-fluoroadenosine
  modified_base 19: mod_base = cm
  modified_base 20: mod_base = um
  modified_base 20^21: mod_base = OTHER; note = phosphorothioate linkage
  modified_base 21: mod_base = cm
  source 1..21: mol_type = other RNA
tgtcaatactcactaccactc

SEQ ID NO: 1309 - RNA, 21 nt, synthetic construct
  modified_base 1: mod_base = OTHER; note = 2'-O-methyladenosine
  modified_base 1^2: mod_base = OTHER; note = phosphorothioate linkage
  modified_base 2: mod_base = OTHER; note = 2'-fluoroguanosine
  modified_base 2^3: mod_base = OTHER; note = phosphorothioate linkage
  modified_base 3: mod_base = OTHER; note = 2'-O-methyladenosine
  modified_base 3^4: mod_base = OTHER; note = phosphorothioate linkage
  modified_base 4: mod_base = OTHER; note = 2'-fluorocytidine
  modified_base 5: mod_base = OTHER; note = 2'-O-methyladenosine
  modified_base 6: mod_base = OTHER; note = 2'-fluoroadenosine
  modified_base 7: mod_base = um
  modified_base 8: mod_base = OTHER; note = 2'-O-methyladenosine
  modified_base 9: mod_base = gm
  modified_base 10: mod_base = um
  modified_base 11: mod_base = OTHER; note = 2'-O-methyladenosine
  modified_base 12: mod_base = OTHER; note = 2'-fluorocytidine
  modified_base 13: mod_base = gm
  modified_base 14: mod_base = OTHER; note = 2'-fluorouridine
  modified_base 15: mod_base = um
  modified_base 16: mod_base = OTHER; note = 2'-fluorocytidine
  modified_base 17: mod_base = cm
  modified_base 18: mod_base = OTHER; note = 2'-fluorocytidine
  modified_base 19: mod_base = um
  modified_base 20: mod_base = cm
  modified_base 20^21: mod_base = OTHER; note = phosphorothioate linkage
  modified_base 21: mod_base = um
  source 1..21: mol_type = other RNA
agacaatagtacgttccctct

SEQ ID NO: 1310 - RNA, 21 nt, synthetic construct
  modified_base 1: mod_base = um
  modified_base 1^2: mod_base = OTHER; note = phosphorothioate linkage
  modified_base 2: mod_base = OTHER; note = 2'-fluorocytidine
  modified_base 2^3: mod_base = OTHER; note = phosphorothioate linkage
  modified_base 3: mod_base = OTHER; note = 2'-O-methyladenosine
  modified_base 3^4: mod_base = OTHER; note = phosphorothioate linkage
  modified_base 4: mod_base = OTHER; note = 2'-fluorouridine
  modified_base 5: mod_base = um
  modified_base 6: mod_base = OTHER; note = 2'-fluoroguanosine
  modified_base 7: mod_base = OTHER; note = 2'-O-methyladenosine
  modified_base 8: mod_base = um
  modified_base 9: mod_base = cm
  modified_base 10: mod_base = um
  modified_base 11: mod_base = cm
  modified_base 12: mod_base = OTHER; note = 2'-fluorocytidine
  modified_base 13: mod_base = cm
  modified_base 14: mod_base = OTHER; note = 2'-fluoroadenosine
  modified_base 15: mod_base = cm
  modified_base 16: mod_base = OTHER; note = 2'-fluoroadenosine
  modified_base 17: mod_base = um
  modified_base 18: mod_base = OTHER; note = 2'-fluorocytidine
  modified_base 19: mod_base = OTHER; note = 2'-O-methyladenosine
  modified_base 20: mod_base = um
  modified_base 20^21: mod_base = OTHER; note = phosphorothioate linkage
  modified_base 21: mod_base = cm
  source 1..21: mol_type = other RNA
tcattgatctcccacatcatc

SEQ ID NO: 1311 - RNA, 21 nt, synthetic construct
  modified_base 1: mod_base = um
  modified_base 1^2: mod_base = OTHER; note = phosphorothioate linkage
  modified_base 2: mod_base = OTHER; note = 2'-fluoroguanosine
  modified_base 2^3: mod_base = OTHER; note = phosphorothioate linkage
  modified_base 3: mod_base = gm
  modified_base 3^4: mod_base = OTHER; note = phosphorothioate linkage
  modified_base 4: mod_base = OTHER; note = 2'-fluoroadenosine
  modified_base 5: mod_base = OTHER; note = 2'-O-methyladenosine
  modified_base 6: mod_base = OTHER; note = 2'-fluorocytidine
  modified_base 7: mod_base = OTHER; note = 2'-O-methyladenosine
  modified_base 8: mod_base = gm
  modified_base 9: mod_base = um
  modified_base 10: mod_base = gm
  modified_base 11: mod_base = um
  modified_base 12: mod_base = OTHER; note = 2'-fluorocytidine
  modified_base 13: mod_base = cm
  modified_base 14: mod_base = OTHER; note = 2'-fluorouridine
  modified_base 15: mod_base = um
  modified_base 16: mod_base = OTHER; note = 2'-fluoroadenosine
  modified_base 17: mod_base = cm
  modified_base 18: mod_base = OTHER; note = 2'-fluoroguanosine
  modified_base 19: mod_base = OTHER; note = 2'-O-methyladenosine
  modified_base 20: mod_base = OTHER; note = 2'-O-methyladenosine
  modified_base 20^21: mod_base = OTHER; note = phosphorothioate linkage
  modified_base 21: mod_base = cm
  source 1..21: mol_type = other RNA
tggaacagtgtccttacgaac

SEQ ID NO: 1312 - RNA, 21 nt, synthetic construct
  modified_base 1: mod_base = um
  modified_base 1^2: mod_base = OTHER; note = phosphorothioate linkage
  modified_base 2: mod_base = OTHER; note = 2'-fluorouridine
  modified_base 2^3: mod_base = OTHER; note = phosphorothioate linkage
  modified_base 3: mod_base = gm
  modified_base 3^4: mod_base = OTHER; note = phosphorothioate linkage
  modified_base 4: mod_base = OTHER; note = 2'-fluorouridine
  modified_base 5: mod_base = um
  modified_base 6: mod_base = OTHER; note = 2'-fluoroguanosine
  modified_base 7: mod_base = um
  modified_base 8: mod_base = OTHER; note = 2'-O-methyladenosine
  modified_base 9: mod_base = OTHER; note = 2'-O-methyladenosine
  modified_base 10: mod_base = um
  modified_base 11: mod_base = um
  modified_base 12: mod_base = OTHER; note = 2'-fluoroguanosine
  modified_base 13: mod_base = OTHER; note = 2'-O-methyladenosine
  modified_base 14: mod_base = OTHER; note = 2'-fluoroadenosine
  modified_base 15: mod_base = um
  modified_base 16: mod_base = OTHER; note = 2'-fluoroadenosine
  modified_base 17: mod_base = cm
  modified_base 18: mod_base = OTHER; note = 2'-fluorouridine
  modified_base 19: mod_base = gm
  modified_base 20: mod_base = gm
  modified_base 20^21: mod_base = OTHER; note = phosphorothioate linkage
  modified_base 21: mod_base = OTHER; note = 2'-O-methyladenosine
  source 1..21: mol_type = other RNA
ttgttgtaattgaatactgga

SEQ ID NO: 1313 - RNA, 21 nt, synthetic construct
  modified_base 1: mod_base = um
  modified_base 1^2: mod_base = OTHER; note = phosphorothioate linkage
  modified_base 2: mod_base = OTHER; note = 2'-fluoroadenosine
  modified_base 2^3: mod_base = OTHER; note = phosphorothioate linkage
  modified_base 3: mod_base = gm
  modified_base 3^4: mod_base = OTHER; note = phosphorothioate linkage
  modified_base 4: mod_base = OTHER; note = 2'-fluorouridine
  modified_base 5: mod_base = OTHER; note = 2'-O-methyladenosine
  modified_base 6: mod_base = OTHER; note = 2'-fluoroadenosine
  modified_base 7: mod_base = gm
  modified_base 8: mod_base = um
  modified_base 9: mod_base = OTHER; note = 2'-O-methyladenosine
  modified_base 10: mod_base = um
  modified_base 11: mod_base = gm
  modified_base 12: mod_base = OTHER; note = 2'-fluorocytidine
  modified_base 13: mod_base = um
  modified_base 14: mod_base = OTHER; note = 2'-fluoroadenosine
  modified_base 15: mod_base = gm
  modified_base 16: mod_base = OTHER; note = 2'-fluoroadenosine
  modified_base 17: mod_base = gm
  modified_base 18: mod_base = OTHER; note = 2'-fluorouridine
  modified_base 19: mod_base = cm
  modified_base 20: mod_base = cm
  modified_base 20^21: mod_base = OTHER; note = phosphorothioate linkage
  modified_base 21: mod_base = cm
  source 1..21: mol_type = other RNA
tagtaagtatgctagagtccc

SEQ ID NO: 1314 - RNA, 21 nt, synthetic construct
  modified_base 1: mod_base = OTHER; note = 5'-cyclopropyl phosphonate-2'-O-methyluridine
  modified_base 1^2: mod_base = OTHER; note = phosphorothioate linkage
  modified_base 2: mod_base = OTHER; note = 2'-fluoroadenosine
  modified_base 2^3: mod_base = OTHER; note = phosphorothioate linkage
  modified_base 3: mod_base = gm
  modified_base 3^4: mod_base = OTHER; note = phosphorothioate linkage
  modified_base 4: mod_base = OTHER; note = 2'-fluorouridine
  modified_base 5: mod_base = OTHER; note = 2'-O-methyladenosine
  modified_base 6: mod_base = OTHER; note = 2'-fluoroadenosine
  modified_base 7: mod_base = gm
  modified_base 8: mod_base = um
  modified_base 9: mod_base = OTHER; note = 2'-O-methyladenosine
  modified_base 10: mod_base = um
  modified_base 11: mod_base = gm
  modified_base 12: mod_base = OTHER; note = 2'-fluorocytidine
  modified_base 13: mod_base = um
  modified_base 14: mod_base = OTHER; note = 2'-fluoroadenosine
  modified_base 15: mod_base = gm
  modified_base 16: mod_base = OTHER; note = 2'-fluoroadenosine
  modified_base 17: mod_base = gm
  modified_base 18: mod_base = OTHER; note = 2'-fluorouridine
  modified_base 19: mod_base = cm
  modified_base 20: mod_base = cm
  modified_base 20^21: mod_base = OTHER; note = phosphorothioate linkage
  modified_base 21: mod_base = cm
  source 1..21: mol_type = other RNA
tagtaagtatgctagagtccc

SEQ ID NO: 1315 - RNA, 21 nt, synthetic construct
  modified_base 1: mod_base = OTHER; note = 5'-cyclopropyl phosphonate-2'-O-methyluridine
  modified_base 1^2: mod_base = OTHER; note = phosphorothioate linkage
  modified_base 2: mod_base = OTHER; note = 2'-fluoroguanosine
  modified_base 2^3: mod_base = OTHER; note = phosphorothioate linkage
  modified_base 3: mod_base = gm
  modified_base 3^4: mod_base = OTHER; note = phosphorothioate linkage
  modified_base 4: mod_base = OTHER; note = 2'-fluorouridine
  modified_base 5: mod_base = cm
  modified_base 6: mod_base = OTHER; note = 2'-fluorouridine
  modified_base 7: mod_base = um
  modified_base 8: mod_base = OTHER; note = 2'-O-methyladenosine
  modified_base 9: mod_base = gm
  modified_base 10: mod_base = um
  modified_base 11: mod_base = gm
  modified_base 12: mod_base = OTHER; note = 2'-fluoroadenosine
  modified_base 13: mod_base = gm
  modified_base 14: mod_base = OTHER; note = 2'-fluorouridine
  modified_base 15: mod_base = OTHER; note = 2'-O-methyladenosine
  modified_base 16: mod_base = OTHER; note = 2'-fluorouridine
  modified_base 17: mod_base = cm
  modified_base 18: mod_base = OTHER; note = 2'-fluorouridine
  modified_base 19: mod_base = cm
  modified_base 20: mod_base = gm
  modified_base 20^21: mod_base = OTHER; note = phosphorothioate linkage
  modified_base 21: mod_base = cm
  source 1..21: mol_type = other RNA
tggtcttagtgagtatctcgc

SEQ ID NO: 1316 - RNA, 21 nt, synthetic construct
  modified_base 1: mod_base = OTHER; note = 5'-cyclopropyl phosphonate-2'-O-methyluridine
  modified_base 1^2: mod_base = OTHER; note = phosphorothioate linkage
  modified_base 2: mod_base = OTHER; note = 2'-fluorocytidine
  modified_base 2^3: mod_base = OTHER; note = phosphorothioate linkage
  modified_base 3: mod_base = OTHER; note = 2'-O-methyladenosine
  modified_base 3^4: mod_base = OTHER; note = phosphorothioate linkage
  modified_base 4: mod_base = OTHER; note = 2'-fluorouridine
  modified_base 5: mod_base = gm
  modified_base 6: mod_base = OTHER; note = 2'-fluorouridine
  modified_base 7: mod_base = um
  modified_base 8: mod_base = um
  modified_base 9: mod_base = cm
  modified_base 10: mod_base = OTHER; note = 2'-O-methyladenosine
  modified_base 11: mod_base = OTHER; note = 2'-O-methyladenosine
  modified_base 12: mod_base = OTHER; note = 2'-fluorocytidine
  modified_base 13: mod_base = cm
  modified_base 14: mod_base = OTHER; note = 2'-fluorouridine
  modified_base 15: mod_base = um
  modified_base 16: mod_base = OTHER; note = 2'-fluorouridine
  modified_base 17: mod_base = cm
  modified_base 18: mod_base = OTHER; note = 2'-fluoroguanosine
  modified_base 19: mod_base = OTHER; note = 2'-O-methyladenosine
  modified_base 20: mod_base = cm
  modified_base 20^21: mod_base = OTHER; note = phosphorothioate linkage
  modified_base 21: mod_base = cm
  source 1..21: mol_type = other RNA
tcatgtttcaacctttcgacc

SEQ ID NO: 1317 - RNA, 21 nt, synthetic construct
  modified_base 1: mod_base = OTHER; note = 5'-cyclopropyl phosphonate-2'-O-methyluridine
  modified_base 1^2: mod_base = OTHER; note = phosphorothioate linkage
  modified_base 2: mod_base = OTHER; note = 2'-fluorouridine
  modified_base 2^3: mod_base = OTHER; note = phosphorothioate linkage
  modified_base 3: mod_base = OTHER; note = 2'-O-methyladenosine
  modified_base 3^4: mod_base = OTHER; note = phosphorothioate linkage
  modified_base 4: mod_base = OTHER; note = 2'-fluoroguanosine
  modified_base 5: mod_base = cm
  modified_base 6: mod_base = OTHER; note = 2'-fluoroadenosine
  modified_base 7: mod_base = um
  modified_base 8: mod_base = gm
  modified_base 9: mod_base = um
  modified_base 10: mod_base = OTHER; note = 2'-O-methyladenosine
  modified_base 11: mod_base = cm
  modified_base 12: mod_base = OTHER; note = 2'-fluoroguanosine
  modified_base 13: mod_base = cm
  modified_base 14: mod_base = OTHER; note = 2'-fluorocytidine
  modified_base 15: mod_base = OTHER; note = 2'-O-methyladenosine
  modified_base 16: mod_base = OTHER; note = 2'-fluorocytidine
  modified_base 17: mod_base = cm
  modified_base 18: mod_base = OTHER; note = 2'-fluoroadenosine
  modified_base 19: mod_base = um
  modified_base 20: mod_base = cm
  modified_base 20^21: mod_base = OTHER; note = phosphorothioate linkage
  modified_base 21: mod_base = OTHER; note = 2'-O-methyladenosine
  source 1..21: mol_type = other RNA
ttagcatgtacgccaccatca

SEQ ID NO: 1318 - RNA, 21 nt, synthetic construct
  modified_base 1: mod_base = OTHER; note = 5'-cyclopropyl phosphonate-2'-O-methyluridine
  modified_base 1^2: mod_base = OTHER; note = phosphorothioate linkage
  modified_base 2: mod_base = OTHER; note = 2'-fluoroadenosine
  modified_base 2^3: mod_base = OTHER; note = phosphorothioate linkage
  modified_base 3: mod_base = cm
  modified_base 3^4: mod_base = OTHER; note = phosphorothioate linkage
  modified_base 4: mod_base = OTHER; note = 2'-fluorouridine
  modified_base 5: mod_base = gm
  modified_base 6: mod_base = OTHER; note = 2'-fluoroadenosine
  modified_base 7: mod_base = um
  modified_base 8: mod_base = gm
  modified_base 9: mod_base = OTHER; note = 2'-O-methyladenosine
  modified_base 10: mod_base = um
  modified_base 11: mod_base = cm
  modified_base 12: mod_base = OTHER; note = 2'-fluorocytidine
  modified_base 13: mod_base = gm
  modified_base 14: mod_base = OTHER; note = 2'-fluorocytidine
  modified_base 15: mod_base = um
  modified_base 16: mod_base = OTHER; note = 2'-fluorouridine
  modified_base 17: mod_base = gm
  modified_base 18: mod_base = OTHER; note = 2'-fluorouridine
  modified_base 19: mod_base = cm
  modified_base 20: mod_base = cm
  modified_base 20^21: mod_base = OTHER; note = phosphorothioate linkage
  modified_base 21: mod_base = um
  source 1..21: mol_type = other RNA
tactgatgatccgcttgtcct

SEQ ID NO: 1319 - RNA, 21 nt, synthetic construct
  modified_base 1: mod_base = OTHER; note = 5'-cyclopropyl phosphonate-2'-O-methyluridine
  modified_base 1^2: mod_base = OTHER; note = phosphorothioate linkage
  modified_base 2: mod_base = OTHER; note = 2'-fluorouridine
  modified_base 2^3: mod_base = OTHER; note = phosphorothioate linkage
  modified_base 3: mod_base = OTHER; note = 2'-O-methyladenosine
  modified_base 3^4: mod_base = OTHER; note = phosphorothioate linkage
  modified_base 4: mod_base = OTHER; note = 2'-fluorocytidine
  modified_base 5: mod_base = um
  modified_base 6: mod_base = OTHER; note = 2'-fluoroadenosine
  modified_base 7: mod_base = um
  modified_base 8: mod_base = gm
  modified_base 9: mod_base = um
  modified_base 10: mod_base = um
  modified_base 11: mod_base = um
  modified_base 12: mod_base = OTHER; note = 2'-fluorocytidine
  modified_base 13: mod_base = um
  modified_base 14: mod_base = OTHER; note = 2'-fluoroadenosine
  modified_base 15: mod_base = gm
  modified_base 16: mod_base = OTHER; note = 2'-fluorocytidine
  modified_base 17: mod_base = OTHER; note = 2'-O-methyladenosine
  modified_base 18: mod_base = OTHER; note = 2'-fluoroguanosine
  modified_base 19: mod_base = cm
  modified_base 20: mod_base = gm
  modified_base 20^21: mod_base = OTHER; note = phosphorothioate linkage
  modified_base 21: mod_base = OTHER; note = 2'-O-methyladenosine
  source 1..21: mol_type = other RNA
ttactatgtttctagcagcga

SEQ ID NO: 1320 - RNA, 21 nt, synthetic construct
  modified_base 1: mod_base = OTHER; note = 5'-cyclopropyl phosphonate-2'-O-methyluridine
  modified_base 1^2: mod_base = OTHER; note = phosphorothioate linkage
  modified_base 2: mod_base = OTHER; note = 2'-fluorouridine
  modified_base 2^3: mod_base = OTHER; note = phosphorothioate linkage
  modified_base 3: mod_base = gm
  modified_base 3^4: mod_base = OTHER; note = phosphorothioate linkage
  modified_base 4: mod_base = OTHER; note = 2'-fluorouridine
  modified_base 5: mod_base = um
  modified_base 6: mod_base = OTHER; note = 2'-fluoroguanosine
  modified_base 7: mod_base = um
  modified_base 8: mod_base = OTHER; note = 2'-O-methyladenosine
  modified_base 9: mod_base = OTHER; note = 2'-O-methyladenosine
  modified_base 10: mod_base = um
  modified_base 11: mod_base = um
  modified_base 12: mod_base = OTHER; note = 2'-fluoroguanosine
  modified_base 13: mod_base = OTHER; note = 2'-O-methyladenosine
  modified_base 14: mod_base = OTHER; note = 2'-fluoroadenosine
  modified_base 15: mod_base = um
  modified_base 16: mod_base = OTHER; note = 2'-fluoroadenosine
  modified_base 17: mod_base = cm
  modified_base 18: mod_base = OTHER; note = 2'-fluorouridine
  modified_base 19: mod_base = gm
  modified_base 20: mod_base = gm
  modified_base 20^21: mod_base = OTHER; note = phosphorothioate linkage
  modified_base 21: mod_base = OTHER; note = 2'-O-methyladenosine
  source 1..21: mol_type = other RNA
ttgttgtaattgaatactgga

SEQ ID NO: 1321 - RNA, 21 nt, synthetic construct
  modified_base 1: mod_base = um
  modified_base 1^2: mod_base = OTHER; note = phosphorothioate linkage
  modified_base 2: mod_base = OTHER; note = 2'-fluoroadenosine
  modified_base 2^3: mod_base = OTHER; note = phosphorothioate linkage
  modified_base 3: mod_base = cm
  modified_base 3^4: mod_base = OTHER; note = phosphorothioate linkage
  modified_base 4: mod_base = OTHER; note = 2'-fluorocytidine
  modified_base 5: mod_base = OTHER; note = 2'-O-methyladenosine
  modified_base 6: mod_base = OTHER; note = 2'-fluoroadenosine
  modified_base 7: mod_base = um
  modified_base 8: mod_base = cm
  modified_base 9: mod_base = OTHER; note = 2'-O-methyladenosine
  modified_base 10: mod_base = um
  modified_base 11: mod_base = um
  modified_base 12: mod_base = OTHER; note = 2'-fluorocytidine
  modified_base 13: mod_base = um
  modified_base 14: mod_base = OTHER; note = 2'-fluorouridine
  modified_base 15: mod_base = cm
  modified_base 16: mod_base = OTHER; note = 2'-fluorocytidine
  modified_base 17: mod_base = gm
  modified_base 18: mod_base = OTHER; note = 2'-fluoroadenosine
  modified_base 19: mod_base = cm
  modified_base 20: mod_base = OTHER; note = 2'-O-methyladenosine
  modified_base 20^21: mod_base = OTHER; note = phosphorothioate linkage
  modified_base 21: mod_base = gm
  source 1..21: mol_type = other RNA
taccaatcattcttccgacag

SEQ ID NO: 1322 - RNA, 21 nt, synthetic construct
  modified_base 1: mod_base = OTHER; note = 2'-O-methyladenosine
  modified_base 1^2: mod_base = OTHER; note = phosphorothioate linkage
  modified_base 2: mod_base = OTHER; note = 2'-fluorouridine
  modified_base 2^3: mod_base = OTHER; note = phosphorothioate linkage
  modified_base 3: mod_base = gm
  modified_base 3^4: mod_base = OTHER; note = phosphorothioate linkage
  modified_base 4: mod_base = OTHER; note = 2'-fluorocytidine
  modified_base 5: mod_base = um
  modified_base 6: mod_base = OTHER; note = 2'-fluoroadenosine
  modified_base 7: mod_base = um
  modified_base 8: mod_base = um
  modified_base 9: mod_base = cm
  modified_base 10: mod_base = um
  modified_base 11: mod_base = gm
  modified_base 12: mod_base = OTHER; note = 2'-fluoroguanosine
  modified_base 13: mod_base = OTHER; note = 2'-O-methyladenosine
  modified_base 14: mod_base = OTHER; note = 2'-fluorouridine
  modified_base 15: mod_base = um
  modified_base 16: mod_base = OTHER; note = 2'-fluoroadenosine
  modified_base 17: mod_base = gm
  modified_base 18: mod_base = OTHER; note = 2'-fluorouridine
  modified_base 19: mod_base = cm
  modified_base 20: mod_base = gm
  modified_base 20^21: mod_base = OTHER; note = phosphorothioate linkage
  modified_base 21: mod_base = um
  source 1..21: mol_type = other RNA
atgctattctggattagtcgt

SEQ ID NO: 1323 - RNA, 21 nt, synthetic construct
  modified_base 1: mod_base = um
  modified_base 1^2: mod_base = OTHER; note = phosphorothioate linkage
  modified_base 2: mod_base = OTHER; note = 2'-fluorocytidine
  modified_base 2^3: mod_base = OTHER; note = phosphorothioate linkage
  modified_base 3: mod_base = OTHER; note = 2'-O-methyladenosine
  modified_base 3^4: mod_base = OTHER; note = phosphorothioate linkage
  modified_base 4: mod_base = OTHER; note = 2'-fluoroguanosine
  modified_base 5: mod_base = OTHER; note = 2'-O-methyladenosine
  modified_base 6: mod_base = OTHER; note = 2'-fluoroadenosine
  modified_base 7: mod_base = OTHER; note = 2'-O-methyladenosine
  modified_base 8: mod_base = gm
  modified_base 9: mod_base = cm
  modified_base 10: mod_base = OTHER; note = 2'-O-methyladenosine
  modified_base 11: mod_base = cm
  modified_base 12: mod_base = OTHER; note = 2'-fluorocytidine
  modified_base 13: mod_base = OTHER; note = 2'-O-methyladenosine
  modified_base 14: mod_base = OTHER; note = 2'-fluorouridine
  modified_base 15: mod_base = cm
  modified_base 16: mod_base = OTHER; note = 2'-fluorocytidine
  modified_base 17: mod_base = um
  modified_base 18: mod_base = OTHER; note = 2'-fluorocytidine
  modified_base 19: mod_base = um
  modified_base 20: mod_base = cm
  modified_base 20^21: mod_base = OTHER; note = phosphorothioate linkage
  modified_base 21: mod_base = um
  source 1..21: mol_type = other RNA
tcagaaagcaccatcctctct

SEQ ID NO: 1324 - RNA, 21 nt, synthetic construct
  modified_base 1: mod_base = um
  modified_base 1^2: mod_base = OTHER; note = phosphorothioate linkage
  modified_base 2: mod_base = OTHER; note = 2'-fluorocytidine
  modified_base 2^3: mod_base = OTHER; note = phosphorothioate linkage
  modified_base 3: mod_base = cm
  modified_base 3^4: mod_base = OTHER; note = phosphorothioate linkage
  modified_base 4: mod_base = OTHER; note = 2'-fluoroadenosine
  modified_base 5: mod_base = OTHER; note = 2'-O-methyladenosine
  modified_base 6: mod_base = OTHER; note = 2'-fluoroadenosine
  modified_base 7: mod_base = um
  modified_base 8: mod_base = cm
  modified_base 9: mod_base = OTHER; note = 2'-O-methyladenosine
  modified_base 10: mod_base = um
  modified_base 11: mod_base = gm
  modified_base 12: mod_base = OTHER; note = 2'-fluoroadenosine
  modified_base 13: mod_base = um
  modified_base 14: mod_base = OTHER; note = 2'-fluoroadenosine
  modified_base 15: mod_base = um
  modified_base 16: mod_base = OTHER; note = 2'-fluoroguanosine
  modified_base 17: mod_base = OTHER; note = 2'-O-methyladenosine
  modified_base 18: mod_base = OTHER; note = 2'-fluoroguanosine
  modified_base 19: mod_base = um
  modified_base 20: mod_base = OTHER; note = 2'-O-methyladenosine
  modified_base 20^21: mod_base = OTHER; note = phosphorothioate linkage
  modified_base 21: mod_base = cm
  source 1..21: mol_type = other RNA
tccaaatcatgatatgagtac

SEQ ID NO: 1325 - RNA, 21 nt, synthetic construct
  modified_base 1: mod_base = um
  modified_base 1^2: mod_base = OTHER; note = phosphorothioate linkage
  modified_base 2: mod_base = OTHER; note = 2'-fluorouridine
  modified_base 2^3: mod_base = OTHER; note = phosphorothioate linkage
  modified_base 3: mod_base = gm
  modified_base 3^4: mod_base = OTHER; note = phosphorothioate linkage
  modified_base 4: mod_base = OTHER; note = 2'-fluoroadenosine
  modified_base 5: mod_base = um
  modified_base 6: mod_base = OTHER; note = 2'-fluoroadenosine
  modified_base 7: mod_base = um
  modified_base 8: mod_base = gm
  modified_base 9: mod_base = um
  modified_base 10: mod_base = gm
  modified_base 11: mod_base = gm
  modified_base 12: mod_base = OTHER; note = 2'-fluorocytidine
  modified_base 13: mod_base = OTHER; note = 2'-O-methyladenosine
  modified_base 14: mod_base = OTHER; note = 2'-fluorouridine
  modified_base 15: mod_base = cm
  modified_base 16: mod_base = OTHER; note = 2'-fluoroadenosine
  modified_base 17: mod_base = um
  modified_base 18: mod_base = OTHER; note = 2'-fluorouridine
  modified_base 19: mod_base = cm
  modified_base 20: mod_base = OTHER; note = 2'-O-methyladenosine
  modified_base 20^21: mod_base = OTHER; note = phosphorothioate linkage
  modified_base 21: mod_base = gm
  source 1..21: mol_type = other RNA
ttgatatgtggcatcattcag

SEQ ID NO: 1326 - RNA, 21 nt, synthetic construct
  modified_base 1: mod_base = um
  modified_base 1^2: mod_base = OTHER; note = phosphorothioate linkage
  modified_base 2: mod_base = OTHER; note = 2'-fluoroguanosine
  modified_base 2^3: mod_base = OTHER; note = phosphorothioate linkage
  modified_base 3: mod_base = um
  modified_base 3^4: mod_base = OTHER; note = phosphorothioate linkage
  modified_base 4: mod_base = OTHER; note = 2'-fluorouridine
  modified_base 5: mod_base = gm
  modified_base 6: mod_base = OTHER; note = 2'-fluoroadenosine
  modified_base 7: mod_base = OTHER; note = 2'-O-methyladenosine
  modified_base 8: mod_base = cm
  modified_base 9: mod_base = cm
  modified_base 10: mod_base = um
  modified_base 11: mod_base = um
  modified_base 12: mod_base = OTHER; note = 2'-fluoroguanosine
  modified_base 13: mod_base = cm
  modified_base 14: mod_base = OTHER; note = 2'-fluoroadenosine
  modified_base 15: mod_base = um
  modified_base 16: mod_base = OTHER; note = 2'-fluorouridine
  modified_base 17: mod_base = OTHER; note = 2'-O-methyladenosine
  modified_base 18: mod_base = OTHER; note = 2'-fluoroguanosine
  modified_base 19: mod_base = OTHER; note = 2'-O-methyladenosine
  modified_base 20: mod_base = gm
  modified_base 20^21: mod_base = OTHER; note = phosphorothioate linkage
  modified_base 21: mod_base = cm
  source 1..21: mol_type = other RNA
tgttgaaccttgcattagagc

SEQ ID NO: 1327 - RNA, 21 nt, synthetic construct
  modified_base 1: mod_base = um
  modified_base 1^2: mod_base = OTHER; note = phosphorothioate linkage
  modified_base 2: mod_base = OTHER; note = 2'-fluorocytidine
  modified_base 2^3: mod_base = OTHER; note = phosphorothioate linkage
  modified_base 3: mod_base = OTHER; note = 2'-O-methyladenosine
  modified_base 3^4: mod_base = OTHER; note = phosphorothioate linkage
  modified_base 4: mod_base = OTHER; note = 2'-fluorocytidine
  modified_base 5: mod_base = gm
  modified_base 6: mod_base = OTHER; note = 2'-fluorouridine
  modified_base 7: mod_base = um
  modified_base 8: mod_base = um
  modified_base 9: mod_base = gm
  modified_base 10: mod_base = OTHER; note = 2'-O-methyladenosine
  modified_base 11: mod_base = um
  modified_base 12: mod_base = OTHER; note = 2'-fluorocytidine
  modified_base 13: mod_base = OTHER; note = 2'-O-methyladenosine
  modified_base 14: mod_base = OTHER; note = 2'-fluorouridine
  modified_base 15: mod_base = um
  modified_base 16: mod_base = OTHER; note = 2'-fluorocytidine
  modified_base 17: mod_base = um
  modified_base 18: mod_base = OTHER; note = 2'-fluoroguanosine
  modified_base 19: mod_base = OTHER; note = 2'-O-methyladenosine
  modified_base 20: mod_base = um
  modified_base 20^21: mod_base = OTHER; note = phosphorothioate linkage
  modified_base 21: mod_base = cm
  source 1..21: mol_type = other RNA
tcacgtttgatcattctgatc

SEQ ID NO: 1328 - RNA, 21 nt, synthetic construct
  modified_base 1: mod_base = um
  modified_base 1^2: mod_base = OTHER; note = phosphorothioate linkage
  modified_base 2: mod_base = OTHER; note = 2'-fluorocytidine
  modified_base 2^3: mod_base = OTHER; note = phosphorothioate linkage
  modified_base 3: mod_base = OTHER; note = 2'-O-methyladenosine
  modified_base 3^4: mod_base = OTHER; note = phosphorothioate linkage
  modified_base 4: mod_base = OTHER; note = 2'-fluoroguanosine
  modified_base 5: mod_base = OTHER; note = 2'-O-methyladenosine
  modified_base 6: mod_base = OTHER; note = 2'-fluoroadenosine
  modified_base 7: mod_base = OTHER; note = 2'-O-methyladenosine
  modified_base 8: mod_base = um
  modified_base 9: mod_base = um
  modified_base 10: mod_base = um
  modified_base 11: mod_base = cm
  modified_base 12: mod_base = OTHER; note = 2'-fluoroguanosine
  modified_base 13: mod_base = gm
  modified_base 14: mod_base = OTHER; note = 2'-fluorouridine
  modified_base 15: mod_base = cm
  modified_base 16: mod_base = OTHER; note = 2'-fluoroadenosine
  modified_base 17: mod_base = um
  modified_base 18: mod_base = OTHER; note = 2'-fluorouridine
  modified_base 19: mod_base = gm
  modified_base 20: mod_base = OTHER; note = 2'-O-methyladenosine
  modified_base 20^21: mod_base = OTHER; note = phosphorothioate linkage
  modified_base 21: mod_base = cm
  source 1..21: mol_type = other RNA
tcagaaatttcggtcattgac

SEQ ID NO: 1329 - RNA, 21 nt, synthetic construct
  modified_base 1: mod_base = um
  modified_base 1^2: mod_base = OTHER; note = phosphorothioate linkage
  modified_base 2: mod_base = OTHER; note = 2'-fluorocytidine
  modified_base 2^3: mod_base = OTHER; note = phosphorothioate linkage
  modified_base 3: mod_base = um
  modified_base 3^4: mod_base = OTHER; note = phosphorothioate linkage
  modified_base 4: mod_base = OTHER; note = 2'-fluorouridine
  modified_base 5: mod_base = um
  modified_base 6: mod_base = OTHER; note = 2'-fluoroguanosine
  modified_base 7: mod_base = OTHER; note = 2'-O-methyladenosine
  modified_base 8: mod_base = gm
  modified_base 9: mod_base = gm
  modified_base 10: mod_base = OTHER; note = 2'-O-methyladenosine
  modified_base 11: mod_base = um
  modified_base 12: mod_base = OTHER; note = 2'-fluoroadenosine
  modified_base 13: mod_base = um
  modified_base 14: mod_base = OTHER; note = 2'-fluorouridine
  modified_base 15: mod_base = gm
  modified_base 16: mod_base = OTHER; note = 2'-fluorocytidine
  modified_base 17: mod_base = OTHER; note = 2'-O-methyladenosine
  modified_base 18: mod_base = OTHER; note = 2'-fluorocytidine
  modified_base 19: mod_base = OTHER; note = 2'-O-methyladenosine
  modified_base 20: mod_base = um
  modified_base 20^21: mod_base = OTHER; note = phosphorothioate linkage
  modified_base 21: mod_base = cm
  source 1..21: mol_type = other RNA
tctttgaggatattgcacatc

SEQ ID NO: 1330 - RNA, 21 nt, synthetic construct
  modified_base 1: mod_base = um
  modified_base 1^2: mod_base = OTHER; note = phosphorothioate linkage
  modified_base 2: mod_base = OTHER; note = 2'-fluorouridine
  modified_base 2^3: mod_base = OTHER; note = phosphorothioate linkage
  modified_base 3: mod_base = cm
  modified_base 3^4: mod_base = OTHER; note = phosphorothioate linkage
  modified_base 4: mod_base = OTHER; note = 2'-fluoroadenosine
  modified_base 5: mod_base = gm
  modified_base 6: mod_base = OTHER; note = 2'-fluoroadenosine
  modified_base 7: mod_base = OTHER; note = 2'-O-methyladenosine
  modified_base 8: mod_base = um
  modified_base 9: mod_base = gm
  modified_base 10: mod_base = OTHER; note = 2'-O-methyladenosine
  modified_base 11: mod_base = gm
  modified_base 12: mod_base = OTHER; note = 2'-fluorouridine
  modified_base 13: mod_base = gm
  modified_base 14: mod_base = OTHER; note = 2'-fluorocytidine
  modified_base 15: mod_base = um
  modified_base 16: mod_base = OTHER; note = 2'-fluoroguanosine
  modified_base 17: mod_base = OTHER; note = 2'-O-methyladenosine
  modified_base 18: mod_base = OTHER; note = 2'-fluorocytidine
  modified_base 19: mod_base = cm
  modified_base 20: mod_base = gm
  modified_base 20^21: mod_base = OTHER; note = phosphorothioate linkage
  modified_base 21: mod_base = um
  source 1..21: mol_type = other RNA
ttcagaatgagtgctgaccgt

SEQ ID NO: 1331 - RNA, 21 nt, synthetic construct
  modified_base 1: mod_base = um
  modified_base 1^2: mod_base = OTHER; note = phosphorothioate linkage
  modified_base 2: mod_base = OTHER; note = 2'-fluoroguanosine
  modified_base 2^3: mod_base = OTHER; note = phosphorothioate linkage
  modified_base 3: mod_base = OTHER; note = 2'-O-methyladenosine
  modified_base 3^4: mod_base = OTHER; note = phosphorothioate linkage
  modified_base 4: mod_base = OTHER; note = 2'-fluorouridine
  modified_base 5: mod_base = um
  modified_base 6: mod_base = OTHER; note = 2'-fluorouridine
  modified_base 7: mod_base = OTHER; note = 2'-O-methyladenosine
  modified_base 8: mod_base = um
  modified_base 9: mod_base = gm
  modified_base 10: mod_base = um
  modified_base 11: mod_base = gm
  modified_base 12: mod_base = OTHER; note = 2'-fluorocytidine
  modified_base 13: mod_base = OTHER; note = 2'-O-methyladenosine
  modified_base 14: mod_base = OTHER; note = 2'-fluoroadenosine
  modified_base 15: mod_base = cm
  modified_base 16: mod_base = OTHER; note = 2'-fluorouridine
  modified_base 17: mod_base = gm
  modified_base 18: mod_base = OTHER; note = 2'-fluoroadenosine
  modified_base 19: mod_base = um
  modified_base 20: mod_base = cm
  modified_base 20^21: mod_base = OTHER; note = phosphorothioate linkage
  modified_base 21: mod_base = cm
  source 1..21: mol_type = other RNA
tgatttatgtgcaactgatcc

SEQ ID NO: 1332 - RNA, 21 nt, synthetic construct
  modified_base 1: mod_base = um
  modified_base 1^2: mod_base = OTHER; note = phosphorothioate linkage
  modified_base 2: mod_base = OTHER; note = 2'-fluoroadenosine
  modified_base 2^3: mod_base = OTHER; note = phosphorothioate linkage
  modified_base 3: mod_base = cm
  modified_base 3^4: mod_base = OTHER; note = phosphorothioate linkage
  modified_base 4: mod_base = OTHER; note = 2'-fluorocytidine
  modified_base 5: mod_base = OTHER; note = 2'-O-methyladenosine
  modified_base 6: mod_base = OTHER; note = 2'-fluoroadenosine
  modified_base 7: mod_base = um
  modified_base 8: mod_base = um
  modified_base 9: mod_base = gm
  modified_base 10: mod_base = OTHER; note = 2'-O-methyladenosine
  modified_base 11: mod_base = cm
  modified_base 12: mod_base = OTHER; note = 2'-fluorouridine
  modified_base 13: mod_base = cm
  modified_base 14: mod_base = OTHER; note = 2'-fluorouridine
  modified_base 15: mod_base = um
  modified_base 16: mod_base = OTHER; note = 2'-fluoroguanosine
  modified_base 17: mod_base = um
  modified_base 18: mod_base = OTHER; note = 2'-fluoroguanosine
  modified_base 19: mod_base = OTHER; note = 2'-O-methyladenosine
  modified_base 20: mod_base = gm
  modified_base 20^21: mod_base = OTHER; note = phosphorothioate linkage
  modified_base 21: mod_base = cm
  source 1..21: mol_type = other RNA
taccaattgactcttgtgagc

SEQ ID NO: 1333 - RNA, 21 nt, synthetic construct
  modified_base 1: mod_base = um
  modified_base 1^2: mod_base = OTHER; note = phosphorothioate linkage
  modified_base 2: mod_base = OTHER; note = 2'-fluorouridine
  modified_base 2^3: mod_base = OTHER; note = phosphorothioate linkage
  modified_base 3: mod_base = cm
  modified_base 3^4: mod_base = OTHER; note = phosphorothioate linkage
  modified_base 4: mod_base = OTHER; note = 2'-fluorouridine
  modified_base 5: mod_base = um
  modified_base 6: mod_base = OTHER; note = 2'-fluoroadenosine
  modified_base 7: mod_base = um
  modified_base 8: mod_base = gm
  modified_base 9: mod_base = OTHER; note = 2'-O-methyladenosine
  modified_base 10: mod_base = OTHER; note = 2'-O-methyladenosine
  modified_base 11: mod_base = OTHER; note = 2'-O-methyladenosine
  modified_base 12: mod_base = OTHER; note = 2'-fluorocytidine
  modified_base 13: mod_base = um
  modified_base 14: mod_base = OTHER; note = 2'-fluorouridine
  modified_base 15: mod_base = gm
  modified_base 16: mod_base = OTHER; note = 2'-fluoroadenosine
  modified_base 17: mod_base = um
  modified_base 18: mod_base = OTHER; note = 2'-fluoroadenosine
  modified_base 19: mod_base = cm
  modified_base 20: mod_base = um
  modified_base 20^21: mod_base = OTHER; note = phosphorothioate linkage
  modified_base 21: mod_base = cm
  source 1..21: mol_type = other RNA
ttcttatgaaacttgatactc

SEQ ID NO: 1334 - RNA, 21 nt, synthetic construct
  modified_base 1: mod_base = um
  modified_base 1^2: mod_base = OTHER; note = phosphorothioate linkage
  modified_base 2: mod_base = OTHER; note = 2'-fluoroguanosine
  modified_base 2^3: mod_base = OTHER; note = phosphorothioate linkage
  modified_base 3: mod_base = OTHER; note = 2'-O-methyladenosine
  modified_base 3^4: mod_base = OTHER; note = phosphorothioate linkage
  modified_base 4: mod_base = OTHER; note = 2'-fluoroguanosine
  modified_base 5: mod_base = OTHER; note = 2'-O-methyladenosine
  modified_base 6: mod_base = OTHER; note = 2'-fluoroadenosine
  modified_base 7: mod_base = um
  modified_base 8: mod_base = gm
  modified_base 9: mod_base = um
  modified_base 10: mod_base = OTHER; note = 2'-O-methyladenosine
  modified_base 11: mod_base = gm
  modified_base 12: mod_base = OTHER; note = 2'-fluoroguanosine
  modified_base 13: mod_base = cm
  modified_base 14: mod_base = OTHER; note = 2'-fluorouridine
  modified_base 15: mod_base = gm
  modified_base 16: mod_base = OTHER; note = 2'-fluorocytidine
  modified_base 17: mod_base = OTHER; note = 2'-O-methyladenosine
  modified_base 18: mod_base = OTHER; note = 2'-fluorocytidine
  modified_base 19: mod_base = OTHER; note = 2'-O-methyladenosine
  modified_base 20: mod_base = cm
  modified_base 20^21: mod_base = OTHER; note = phosphorothioate linkage
  modified_base 21: mod_base = um
  source 1..21: mol_type = other RNA
tgagaatgtaggctgcacact

SEQ ID NO: 1335 - RNA, 21 nt, synthetic construct
  modified_base 1: mod_base = um
  modified_base 1^2: mod_base = OTHER; note = phosphorothioate linkage
  modified_base 2: mod_base = OTHER; note = 2'-fluorouridine
  modified_base 2^3: mod_base = OTHER; note = phosphorothioate linkage
  modified_base 3: mod_base = OTHER; note = 2'-O-methyladenosine
  modified_base 3^4: mod_base = OTHER; note = phosphorothioate linkage
  modified_base 4: mod_base = OTHER; note = 2'-fluorocytidine
  modified_base 5: mod_base = um
  modified_base 6: mod_base = OTHER; note = 2'-fluorocytidine
  modified_base 7: mod_base = OTHER; note = 2'-O-methyladenosine
  modified_base 8: mod_base = um
  modified_base 9: mod_base = gm
  modified_base 10: mod_base = um
  modified_base 11: mod_base = cm
  modified_base 12: mod_base = OTHER; note = 2'-fluoroadenosine
  modified_base 13: mod_base = OTHER; note = 2'-O-methyladenosine
  modified_base 14: mod_base = OTHER; note = 2'-fluoroadenosine
  modified_base 15: mod_base = gm
  modified_base 16: mod_base = OTHER; note = 2'-fluoroguanosine
  modified_base 17: mod_base = OTHER; note = 2'-O-methyladenosine
  modified_base 18: mod_base = OTHER; note = 2'-fluoroadenosine
  modified_base 19: mod_base = gm
  modified_base 20: mod_base = gm
  modified_base 20^21: mod_base = OTHER; note = phosphorothioate linkage
  modified_base 21: mod_base = cm
  source 1..21: mol_type = other RNA
ttactcatgtcaaaggaaggc

SEQ ID NO: 1336 - RNA, 21 nt, synthetic construct
  modified_base 1: mod_base = OTHER; note = 2'-O-methyladenosine
  modified_base 1^2: mod_base = OTHER; note = phosphorothioate linkage
  modified_base 2: mod_base = OTHER; note = 2'-fluoroguanosine
  modified_base 2^3: mod_base = OTHER; note = phosphorothioate linkage
  modified_base 3: mod_base = OTHER; note = 2'-O-methyladenosine
  modified_base 3^4: mod_base = OTHER; note = phosphorothioate linkage
  modified_base 4: mod_base = OTHER; note = 2'-fluoroadenosine
  modified_base 5: mod_base = OTHER; note = 2'-O-methyladenosine
  modified_base 6: mod_base = OTHER; note = 2'-fluorouridine
  modified_base 7: mod_base = OTHER; note = 2'-O-methyladenosine
  modified_base 8: mod_base = OTHER; note = 2'-O-methyladenosine
  modified_base 9: mod_base = gm
  modified_base 10: mod_base = OTHER; note = 2'-O-methyladenosine
  modified_base 11: mod_base = cm
  modified_base 12: mod_base = OTHER; note = 2'-fluorocytidine
  modified_base 13: mod_base = cm
  modified_base 14: mod_base = OTHER; note = 2'-fluorouridine
  modified_base 15: mod_base = um
  modified_base 16: mod_base = OTHER; note = 2'-fluorocytidine
  modified_base 17: mod_base = OTHER; note = 2'-O-methyladenosine
  modified_base 18: mod_base = OTHER; note = 2'-fluorouridine
  modified_base 19: mod_base = um
  modified_base 20: mod_base = OTHER; note = 2'-O-methyladenosine
  modified_base 20^21: mod_base = OTHER; note = phosphorothioate linkage
  modified_base 21: mod_base = cm
  source 1..21: mol_type = other RNA
agaaataagacccttcattac

SEQ ID NO: 1337 - RNA, 21 nt, synthetic construct
  modified_base 1: mod_base = OTHER; note = 5'-cyclopropyl phosphonate-2'-O-methyluridine
  modified_base 1^2: mod_base = OTHER; note = phosphorothioate linkage
  modified_base 2: mod_base = OTHER; note = 2'-fluorouridine
  modified_base 2^3: mod_base = OTHER; note = phosphorothioate linkage
  modified_base 3: mod_base = OTHER; note = 2'-O-methyladenosine
  modified_base 3^4: mod_base = OTHER; note = phosphorothioate linkage
  modified_base 4: mod_base = OTHER; note = 2'-fluorocytidine
  modified_base 5: mod_base = um
  modified_base 6: mod_base = OTHER; note = 2'-fluorocytidine
  modified_base 7: mod_base = OTHER; note = 2'-O-methyladenosine
  modified_base 8: mod_base = um
  modified_base 9: mod_base = gm
  modified_base 10: mod_base = um
  modified_base 11: mod_base = cm
  modified_base 12: mod_base = OTHER; note = 2'-fluoroadenosine
  modified_base 13: mod_base = OTHER; note = 2'-O-methyladenosine
  modified_base 14: mod_base = OTHER; note = 2'-fluoroadenosine
  modified_base 15: mod_base = gm
  modified_base 16: mod_base = OTHER; note = 2'-fluoroguanosine
  modified_base 17: mod_base = OTHER; note = 2'-O-methyladenosine
  modified_base 18: mod_base = OTHER; note = 2'-fluoroadenosine
  modified_base 19: mod_base = gm
  modified_base 20: mod_base = gm
  modified_base 20^21: mod_base = OTHER; note = phosphorothioate linkage
  modified_base 21: mod_base = cm
  source 1..21: mol_type = other RNA
ttactcatgtcaaaggaaggc

SEQ ID NO: 1338 - RNA, 21 nt, synthetic construct
  modified_base 1: mod_base = OTHER; note = 5'-cyclopropyl phosphonate-2'-O-methyluridine
  modified_base 1^2: mod_base = OTHER; note = phosphorothioate linkage
  modified_base 2: mod_base = OTHER; note = 2'-fluoroguanosine
  modified_base 2^3: mod_base = OTHER; note = phosphorothioate linkage
  modified_base 3: mod_base = um
  modified_base 3^4: mod_base = OTHER; note = phosphorothioate linkage
  modified_base 4: mod_base = OTHER; note = 2'-fluorouridine
  modified_base 5: mod_base = gm
  modified_base 6: mod_base = OTHER; note = 2'-fluoroadenosine
  modified_base 7: mod_base = OTHER; note = 2'-O-methyladenosine
  modified_base 8: mod_base = cm
  modified_base 9: mod_base = cm
  modified_base 10: mod_base = um
  modified_base 11: mod_base = um
  modified_base 12: mod_base = OTHER; note = 2'-fluoroguanosine
  modified_base 13: mod_base = cm
  modified_base 14: mod_base = OTHER; note = 2'-fluoroadenosine
  modified_base 15: mod_base = um
  modified_base 16: mod_base = OTHER; note = 2'-fluorouridine
  modified_base 17: mod_base = OTHER; note = 2'-O-methyladenosine
  modified_base 18: mod_base = OTHER; note = 2'-fluoroguanosine
  modified_base 19: mod_base = OTHER; note = 2'-O-methyladenosine
  modified_base 20: mod_base = gm
  modified_base 20^21: mod_base = OTHER; note = phosphorothioate linkage
  modified_base 21: mod_base = cm
  source 1..21: mol_type = other RNA
tgttgaaccttgcattagagc

SEQ ID NO: 1339 - RNA, 21 nt, synthetic construct
  modified_base 1: mod_base = OTHER; note = 5'-cyclopropyl phosphonate-2'-O-methyladenosine
  modified_base 1^2: mod_base = OTHER; note = phosphorothioate linkage
  modified_base 2: mod_base = OTHER; note = 2'-fluorouridine
  modified_base 2^3: mod_base = OTHER; note = phosphorothioate linkage
  modified_base 3: mod_base = gm
  modified_base 3^4: mod_base = OTHER; note = phosphorothioate linkage
  modified_base 4: mod_base = OTHER; note = 2'-fluorocytidine
  modified_base 5: mod_base = um
  modified_base 6: mod_base = OTHER; note = 2'-fluoroadenosine
  modified_base 7: mod_base = um
  modified_base 8: mod_base = um
  modified_base 9: mod_base = cm
  modified_base 10: mod_base = um
  modified_base 11: mod_base = gm
  modified_base 12: mod_base = OTHER; note = 2'-fluoroguanosine
  modified_base 13: mod_base = OTHER; note = 2'-O-methyladenosine
  modified_base 14: mod_base = OTHER; note = 2'-fluorouridine
  modified_base 15: mod_base = um
  modified_base 16: mod_base = OTHER; note = 2'-fluoroadenosine
  modified_base 17: mod_base = gm
  modified_base 18: mod_base = OTHER; note = 2'-fluorouridine
  modified_base 19: mod_base = cm
  modified_base 20: mod_base = gm
  modified_base 20^21: mod_base = OTHER; note = phosphorothioate linkage
  modified_base 21: mod_base = um
  source 1..21: mol_type = other RNA
atgctattctggattagtcgt

SEQ ID NO: 1340 - RNA, 21 nt, synthetic construct
  modified_base 1: mod_base = OTHER; note = 5'-cyclopropyl phosphonate-2'-O-methyluridine
  modified_base 1^2: mod_base = OTHER; note = phosphorothioate linkage
  modified_base 2: mod_base = OTHER; note = 2'-fluorocytidine
  modified_base 2^3: mod_base = OTHER; note = phosphorothioate linkage
  modified_base 3: mod_base = OTHER; note = 2'-O-methyladenosine
  modified_base 3^4: mod_base = OTHER; note = phosphorothioate linkage
  modified_base 4: mod_base = OTHER; note = 2'-fluorocytidine
  modified_base 5: mod_base = gm
  modified_base 6: mod_base = OTHER; note = 2'-fluorouridine
  modified_base 7: mod_base = um
  modified_base 8: mod_base = um
  modified_base 9: mod_base = gm
  modified_base 10: mod_base = OTHER; note = 2'-O-methyladenosine
  modified_base 11: mod_base = um
  modified_base 12: mod_base = OTHER; note = 2'-fluorocytidine
  modified_base 13: mod_base = OTHER; note = 2'-O-methyladenosine
  modified_base 14: mod_base = OTHER; note = 2'-fluorouridine
  modified_base 15: mod_base = um
  modified_base 16: mod_base = OTHER; note = 2'-fluorocytidine
  modified_base 17: mod_base = um
  modified_base 18: mod_base = OTHER; note = 2'-fluoroguanosine
  modified_base 19: mod_base = OTHER; note = 2'-O-methyladenosine
  modified_base 20: mod_base = um
  modified_base 20^21: mod_base = OTHER; note = phosphorothioate linkage
  modified_base 21: mod_base = cm
  source 1..21: mol_type = other RNA
tcacgtttgatcattctgatc

SEQ ID NO: 1341 - RNA, 21 nt, synthetic construct
  modified_base 1: mod_base = OTHER; note = 5'-cyclopropyl phosphonate-2'-O-methyluridine
  modified_base 1^2: mod_base = OTHER; note = phosphorothioate linkage
  modified_base 2: mod_base = OTHER; note = 2'-fluoroadenosine
  modified_base 2^3: mod_base = OTHER; note = phosphorothioate linkage
  modified_base 3: mod_base = cm
  modified_base 3^4: mod_base = OTHER; note = phosphorothioate linkage
  modified_base 4: mod_base = OTHER; note = 2'-fluorocytidine
  modified_base 5: mod_base = OTHER; note = 2'-O-methyladenosine
  modified_base 6: mod_base = OTHER; note = 2'-fluoroadenosine
  modified_base 7: mod_base = um
  modified_base 8: mod_base = cm
  modified_base 9: mod_base = OTHER; note = 2'-O-methyladenosine
  modified_base 10: mod_base = um
  modified_base 11: mod_base = um
  modified_base 12: mod_base = OTHER; note = 2'-fluorocytidine
  modified_base 13: mod_base = um
  modified_base 14: mod_base = OTHER; note = 2'-fluorouridine
  modified_base 15: mod_base = cm
  modified_base 16: mod_base = OTHER; note = 2'-fluorocytidine
  modified_base 17: mod_base = gm
  modified_base 18: mod_base = OTHER; note = 2'-fluoroadenosine
  modified_base 19: mod_base = cm
  modified_base 20: mod_base = OTHER; note = 2'-O-methyladenosine
  modified_base 20^21: mod_base = OTHER; note = phosphorothioate linkage
  modified_base 21: mod_base = gm
  source 1..21: mol_type = other RNA
taccaatcattcttccgacag

SEQ ID NO: 1342 - RNA, 21 nt, synthetic construct
  modified_base 1: mod_base = OTHER; note = 5'-cyclopropyl phosphonate-2'-O-methyluridine
  modified_base 1^2: mod_base = OTHER; note = phosphorothioate linkage
  modified_base 2: mod_base = OTHER; note = 2'-fluorocytidine
  modified_base 2^3: mod_base = OTHER; note = phosphorothioate linkage
  modified_base 3: mod_base = OTHER; note = 2'-O-methyladenosine
  modified_base 3^4: mod_base = OTHER; note = phosphorothioate linkage
  modified_base 4: mod_base = OTHER; note = 2'-fluoroguanosine
  modified_base 5: mod_base = OTHER; note = 2'-O-methyladenosine
  modified_base 6: mod_base = OTHER; note = 2'-fluoroadenosine
  modified_base 7: mod_base = OTHER; note = 2'-O-methyladenosine
  modified_base 8: mod_base = gm
  modified_base 9: mod_base = cm
  modified_base 10: mod_base = OTHER; note = 2'-O-methyladenosine
  modified_base 11: mod_base = cm
  modified_base 12: mod_base = OTHER; note = 2'-fluorocytidine
  modified_base 13: mod_base = OTHER; note = 2'-O-methyladenosine
  modified_base 14: mod_base = OTHER; note = 2'-fluorouridine
  modified_base 15: mod_base = cm
  modified_base 16: mod_base = OTHER; note = 2'-fluorocytidine
  modified_base 17: mod_base = um
  modified_base 18: mod_base = OTHER; note = 2'-fluorocytidine
  modified_base 19: mod_base = um
  modified_base 20: mod_base = cm
  modified_base 20^21: mod_base = OTHER; note = phosphorothioate linkage
  modified_base 21: mod_base = um
  source 1..21: mol_type = other RNA
tcagaaagcaccatcctctct

SEQ ID NO: 1343 - RNA, 21 nt, synthetic construct
  modified_base 1: mod_base = OTHER; note = 5'-cyclopropyl phosphonate-2'-O-methyluridine
  modified_base 1^2: mod_base = OTHER; note = phosphorothioate linkage
  modified_base 2: mod_base = OTHER; note = 2'-fluorouridine
  modified_base 2^3: mod_base = OTHER; note = phosphorothioate linkage
  modified_base 3: mod_base = gm
  modified_base 3^4: mod_base = OTHER; note = phosphorothioate linkage
  modified_base 4: mod_base = OTHER; note = 2'-fluoroadenosine
  modified_base 5: mod_base = um
  modified_base 6: mod_base = OTHER; note = 2'-fluoroadenosine
  modified_base 7: mod_base = um
  modified_base 8: mod_base = gm
  modified_base 9: mod_base = um
  modified_base 10: mod_base = gm
  modified_base 11: mod_base = gm
  modified_base 12: mod_base = OTHER; note = 2'-fluorocytidine
  modified_base 13: mod_base = OTHER; note = 2'-O-methyladenosine
  modified_base 14: mod_base = OTHER; note = 2'-fluorouridine
  modified_base 15: mod_base = cm
  modified_base 16: mod_base = OTHER; note = 2'-fluoroadenosine
  modified_base 17: mod_base = um
  modified_base 18: mod_base = OTHER; note = 2'-fluorouridine
  modified_base 19: mod_base = cm
  modified_base 20: mod_base = OTHER; note = 2'-O-methyladenosine
  modified_base 20^21: mod_base = OTHER; note = phosphorothioate linkage
  modified_base 21: mod_base = gm
  source 1..21: mol_type = other RNA
ttgatatgtggcatcattcag

SEQ ID NO: 1344 - RNA, 21 nt, synthetic construct
  modified_base 1: mod_base = OTHER; note = 5'-cyclopropyl phosphonate-2'-O-methyluridine
  modified_base 1^2: mod_base = OTHER; note = phosphorothioate linkage
  modified_base 2: mod_base = OTHER; note = 2'-fluorouridine
  modified_base 2^3: mod_base = OTHER; note = phosphorothioate linkage
  modified_base 3: mod_base = cm
  modified_base 3^4: mod_base = OTHER; note = phosphorothioate linkage
  modified_base 4: mod_base = OTHER; note = 2'-fluoroadenosine
  modified_base 5: mod_base = gm
  modified_base 6: mod_base = OTHER; note = 2'-fluoroadenosine
  modified_base 7: mod_base = OTHER; note = 2'-O-methyladenosine
  modified_base 8: mod_base = um
  modified_base 9: mod_base = gm
  modified_base 10: mod_base = OTHER; note = 2'-O-methyladenosine
  modified_base 11: mod_base = gm
  modified_base 12: mod_base = OTHER; note = 2'-fluorouridine
  modified_base 13: mod_base = gm
  modified_base 14: mod_base = OTHER; note = 2'-fluorocytidine
  modified_base 15: mod_base = um
  modified_base 16: mod_base = OTHER; note = 2'-fluoroguanosine
  modified_base 17: mod_base = OTHER; note = 2'-O-methyladenosine
  modified_base 18: mod_base = OTHER; note = 2'-fluorocytidine
  modified_base 19: mod_base = cm
  modified_base 20: mod_base = gm
  modified_base 20^21: mod_base = OTHER; note = phosphorothioate linkage
  modified_base 21: mod_base = um
  source 1..21: mol_type = other RNA
ttcagaatgagtgctgaccgt

SEQ ID NO: 1345 - RNA, 21 nt, synthetic construct
  modified_base 1: mod_base = OTHER; note = 5'-cyclopropyl phosphonate-2'-O-methyluridine
  modified_base 1^2: mod_base = OTHER; note = phosphorothioate linkage
  modified_base 2: mod_base = OTHER; note = 2'-fluoroadenosine
  modified_base 2^3: mod_base = OTHER; note = phosphorothioate linkage
  modified_base 3: mod_base = cm
  modified_base 3^4: mod_base = OTHER; note = phosphorothioate linkage
  modified_base 4: mod_base = OTHER; note = 2'-fluorocytidine
  modified_base 5: mod_base = OTHER; note = 2'-O-methyladenosine
  modified_base 6: mod_base = OTHER; note = 2'-fluoroadenosine
  modified_base 7: mod_base = um
  modified_base 8: mod_base = um
  modified_base 9: mod_base = gm
  modified_base 10: mod_base = OTHER; note = 2'-O-methyladenosine
  modified_base 11: mod_base = cm
  modified_base 12: mod_base = OTHER; note = 2'-fluorouridine
  modified_base 13: mod_base = cm
  modified_base 14: mod_base = OTHER; note = 2'-fluorouridine
  modified_base 15: mod_base = um
  modified_base 16: mod_base = OTHER; note = 2'-fluoroguanosine
  modified_base 17: mod_base = um
  modified_base 18: mod_base = OTHER; note = 2'-fluoroguanosine
  modified_base 19: mod_base = OTHER; note = 2'-O-methyladenosine
  modified_base 20: mod_base = gm
  modified_base 20^21: mod_base = OTHER; note = phosphorothioate linkage
  modified_base 21: mod_base = cm
  source 1..21: mol_type = other RNA
taccaattgactcttgtgagc

SEQ ID NO: 1346 - RNA, 21 nt, synthetic construct
  modified_base 1: mod_base = OTHER; note = 5'-cyclopropyl phosphonate-2'-O-methyladenosine
  modified_base 1^2: mod_base = OTHER; note = phosphorothioate linkage
  modified_base 2: mod_base = OTHER; note = 2'-fluoroguanosine
  modified_base 2^3: mod_base = OTHER; note = phosphorothioate linkage
  modified_base 3: mod_base = OTHER; note = 2'-O-methyladenosine
  modified_base 3^4: mod_base = OTHER; note = phosphorothioate linkage
  modified_base 4: mod_base = OTHER; note = 2'-fluoroadenosine
  modified_base 5: mod_base = OTHER; note = 2'-O-methyladenosine
  modified_base 6: mod_base = OTHER; note = 2'-fluorouridine
  modified_base 7: mod_base = OTHER; note = 2'-O-methyladenosine
  modified_base 8: mod_base = OTHER; note = 2'-O-methyladenosine
  modified_base 9: mod_base = gm
  modified_base 10: mod_base = OTHER; note = 2'-O-methyladenosine
  modified_base 11: mod_base = cm
  modified_base 12: mod_base = OTHER; note = 2'-fluorocytidine
  modified_base 13: mod_base = cm
  modified_base 14: mod_base = OTHER; note = 2'-fluorouridine
  modified_base 15: mod_base = um
  modified_base 16: mod_base = OTHER; note = 2'-fluorocytidine
  modified_base 17: mod_base = OTHER; note = 2'-O-methyladenosine
  modified_base 18: mod_base = OTHER; note = 2'-fluorouridine
  modified_base 19: mod_base = um
  modified_base 20: mod_base = OTHER; note = 2'-O-methyladenosine
  modified_base 20^21: mod_base = OTHER; note = phosphorothioate linkage
  modified_base 21: mod_base = cm
  source 1..21: mol_type = other RNA
agaaataagacccttcattac

SEQ ID NO: 1347 - RNA, 21 nt, synthetic construct
  modified_base 1: mod_base = um
  modified_base 1^2: mod_base = OTHER; note = phosphorothioate linkage
  modified_base 2: mod_base = OTHER; note = 2'-fluoroadenosine
  modified_base 2^3: mod_base = OTHER; note = phosphorothioate linkage
  modified_base 3: mod_base = OTHER; note = 2'-O-methyladenosine
  modified_base 3^4: mod_base = OTHER; note = phosphorothioate linkage
  modified_base 4: mod_base = OTHER; note = 2'-fluoroguanosine
  modified_base 5: mod_base = cm
  modified_base 6: mod_base = OTHER; note = 2'-fluoroadenosine
  modified_base 7: mod_base = um
  modified_base 8: mod_base = um
  modified_base 9: mod_base = gm
  modified_base 10: mod_base = um
  modified_base 11: mod_base = cm
  modified_base 12: mod_base = OTHER; note = 2'-fluoroguanosine
  modified_base 13: mod_base = cm
  modified_base 14: mod_base = OTHER; note = 2'-fluoroadenosine
  modified_base 15: mod_base = cm
  modified_base 16: mod_base = OTHER; note = 2'-fluoroadenosine
  modified_base 17: mod_base = OTHER; note = 2'-O-methyladenosine
  modified_base 18: mod_base = OTHER; note = 2'-fluoroadenosine
  modified_base 19: mod_base = gm
  modified_base 20: mod_base = um
  modified_base 20^21: mod_base = OTHER; note = phosphorothioate linkage
  modified_base 21: mod_base = cm
  source 1..21: mol_type = other RNA
taagcattgtcgcacaaagtc

SEQ ID NO: 1348 - RNA, 21 nt, synthetic construct
  modified_base 1: mod_base = um
  modified_base 1^2: mod_base = OTHER; note = phosphorothioate linkage
  modified_base 2: mod_base = OTHER; note = 2'-fluoroguanosine
  modified_base 2^3: mod_base = OTHER; note = phosphorothioate linkage
  modified_base 3: mod_base = OTHER; note = 2'-O-methyladenosine
  modified_base 3^4: mod_base = OTHER; note = phosphorothioate linkage
  modified_base 4: mod_base = OTHER; note = 2'-fluoroadenosine
  modified_base 5: mod_base = OTHER; note = 2'-O-methyladenosine
  modified_base 6: mod_base = OTHER; note = 2'-fluorouridine
  modified_base 7: mod_base = gm
  modified_base 8: mod_base = gm
  modified_base 9: mod_base = OTHER; note = 2'-O-methyladenosine
  modified_base 10: mod_base = OTHER; note = 2'-O-methyladenosine
  modified_base 11: mod_base = OTHER; note = 2'-O-methyladenosine
  modified_base 12: mod_base = OTHER; note = 2'-fluorouridine
  modified_base 13: mod_base = cm
  modified_base 14: mod_base = OTHER; note = 2'-fluorocytidine
  modified_base 15: mod_base = gm
  modified_base 16: mod_base = OTHER; note = 2'-fluoroadenosine
  modified_base 17: mod_base = OTHER; note = 2'-O-methyladenosine
  modified_base 18: mod_base = OTHER; note = 2'-fluorouridine
  modified_base 19: mod_base = OTHER; note = 2'-O-methyladenosine
  modified_base 20: mod_base = cm
  modified_base 20^21: mod_base = OTHER; note = phosphorothioate linkage
  modified_base 21: mod_base = cm
  source 1..21: mol_type = other RNA
tgaaatggaaatccgaatacc

SEQ ID NO: 1349 - RNA, 21 nt, synthetic construct
  modified_base 1: mod_base = um
  modified_base 1^2: mod_base = OTHER; note = phosphorothioate linkage
  modified_base 2: mod_base = OTHER; note = 2'-fluorocytidine
  modified_base 2^3: mod_base = OTHER; note = phosphorothioate linkage
  modified_base 3: mod_base = OTHER; note = 2'-O-methyladenosine
  modified_base 3^4: mod_base = OTHER; note = phosphorothioate linkage
  modified_base 4: mod_base = OTHER; note = 2'-fluorouridine
  modified_base 5: mod_base = gm
  modified_base 6: mod_base = OTHER; note = 2'-fluoroadenosine
  modified_base 7: mod_base = um
  modified_base 8: mod_base = um
  modified_base 9: mod_base = cm
  modified_base 10: mod_base = gm
  modified_base 11: mod_base = gm
  modified_base 12: mod_base = OTHER; note = 2'-fluorouridine
  modified_base 13: mod_base = cm
  modified_base 14: mod_base = OTHER; note = 2'-fluorouridine
  modified_base 15: mod_base = cm
  modified_base 16: mod_base = OTHER; note = 2'-fluorouridine
  modified_base 17: mod_base = um
  modified_base 18: mod_base = OTHER; note = 2'-fluorocytidine
  modified_base 19: mod_base = cm
  modified_base 20: mod_base = um
  modified_base 20^21: mod_base = OTHER; note = phosphorothioate linkage
  modified_base 21: mod_base = um
  source 1..21: mol_type = other RNA
tcatgattcggtctcttcctt

SEQ ID NO: 1350 - RNA, 21 nt, synthetic construct
  modified_base 1: mod_base = um
  modified_base 1^2: mod_base = OTHER; note = phosphorothioate linkage
  modified_base 2: mod_base = OTHER; note = 2'-fluoroguanosine
  modified_base 2^3: mod_base = OTHER; note = phosphorothioate linkage
  modified_base 3: mod_base = OTHER; note = 2'-O-methyladenosine
  modified_base 3^4: mod_base = OTHER; note = phosphorothioate linkage
  modified_base 4: mod_base = OTHER; note = 2'-fluoroadenosine
  modified_base 5: mod_base = OTHER; note = 2'-O-methyladenosine
  modified_base 6: mod_base = OTHER; note = 2'-fluoroadenosine
  modified_base 7: mod_base = gm
  modified_base 8: mod_base = cm
  modified_base 9: mod_base = cm
  modified_base 10: mod_base = um
  modified_base 11: mod_base = OTHER; note = 2'-O-methyladenosine
  modified_base 12: mod_base = OTHER; note = 2'-fluoroguanosine
  modified_base 13: mod_base = um
  modified_base 14: mod_base = OTHER; note = 2'-fluorouridine
  modified_base 15: mod_base = um
  modified_base 16: mod_base = OTHER; note = 2'-fluorouridine
  modified_base 17: mod_base = gm
  modified_base 18: mod_base = OTHER; note = 2'-fluoroadenosine
  modified_base 19: mod_base = um
  modified_base 20: mod_base = um
  modified_base 20^21: mod_base = OTHER; note = phosphorothioate linkage
  modified_base 21: mod_base = cm
  source 1..21: mol_type = other RNA
tgaaaagcctagttttgattc

SEQ ID NO: 1351 - RNA, 21 nt, synthetic construct
  modified_base 1: mod_base = um
  modified_base 1^2: mod_base = OTHER; note = phosphorothioate linkage
  modified_base 2: mod_base = OTHER; note = 2'-fluoroadenosine
  modified_base 2^3: mod_base = OTHER; note = phosphorothioate linkage
  modified_base 3: mod_base = cm
  modified_base 3^4: mod_base = OTHER; note = phosphorothioate linkage
  modified_base 4: mod_base = OTHER; note = 2'-fluoroguanosine
  modified_base 5: mod_base = OTHER; note = 2'-O-methyladenosine
  modified_base 6: mod_base = OTHER; note = 2'-fluoroadenosine
  modified_base 7: mod_base = OTHER; note = 2'-O-methyladenosine
  modified_base 8: mod_base = gm
  modified_base 9: mod_base = gm
  modified_base 10: mod_base = OTHER; note = 2'-O-methyladenosine
  modified_base 11: mod_base = OTHER; note = 2'-O-methyladenosine
  modified_base 12: mod_base = OTHER; note = 2'-fluorouridine
  modified_base 13: mod_base = cm
  modified_base 14: mod_base = OTHER; note = 2'-fluorocytidine
  modified_base 15: mod_base = cm
  modified_base 16: mod_base = OTHER; note = 2'-fluoroadenosine
  modified_base 17: mod_base = um
  modified_base 18: mod_base = OTHER; note = 2'-fluoroadenosine
  modified_base 19: mod_base = gm
  modified_base 20: mod_base = OTHER; note = 2'-O-methyladenosine
  modified_base 20^21: mod_base = OTHER; note = phosphorothioate linkage
  modified_base 21: mod_base = cm
  source 1..21: mol_type = other RNA
tacgaaaggaatcccatagac

SEQ ID NO: 1352 - RNA, 21 nt, synthetic construct
  modified_base 1: mod_base = um
  modified_base 1^2: mod_base = OTHER; note = phosphorothioate linkage
  modified_base 2: mod_base = OTHER; note = 2'-fluorouridine
  modified_base 2^3: mod_base = OTHER; note = phosphorothioate linkage
  modified_base 3: mod_base = um
  modified_base 3^4: mod_base = OTHER; note = phosphorothioate linkage
  modified_base 4: mod_base = OTHER; note = 2'-fluorocytidine
  modified_base 5: mod_base = OTHER; note = 2'-O-methyladenosine
  modified_base 6: mod_base = OTHER; note = 2'-fluoroadenosine
  modified_base 7: mod_base = um
  modified_base 8: mod_base = um
  modified_base 9: mod_base = gm
  modified_base 10: mod_base = um
  modified_base 11: mod_base = cm
  modified_base 12: mod_base = OTHER; note = 2'-fluorouridine
  modified_base 13: mod_base = cm
  modified_base 14: mod_base = OTHER; note = 2'-fluorouridine
  modified_base 15: mod_base = um
  modified_base 16: mod_base = OTHER; note = 2'-fluorocytidine
  modified_base 17: mod_base = gm
  modified_base 18: mod_base = OTHER; note = 2'-fluorocytidine
  modified_base 19: mod_base = cm
  modified_base 20: mod_base = um
  modified_base 20^21: mod_base = OTHER; note = phosphorothioate linkage
  modified_base 21: mod_base = cm
  source 1..21: mol_type = other RNA
tttcaattgtctcttcgcctc

SEQ ID NO: 1353 - RNA, 21 nt, synthetic construct
  modified_base 1: mod_base = um
  modified_base 1^2: mod_base = OTHER; note = phosphorothioate linkage
  modified_base 2: mod_base = OTHER; note = 2'-fluorouridine
  modified_base 2^3: mod_base = OTHER; note = phosphorothioate linkage
  modified_base 3: mod_base = cm
  modified_base 3^4: mod_base = OTHER; note = phosphorothioate linkage
  modified_base 4: mod_base = OTHER; note = 2'-fluoroguanosine
  modified_base 5: mod_base = OTHER; note = 2'-O-methyladenosine
  modified_base 6: mod_base = OTHER; note = 2'-fluoroadenosine
  modified_base 7: mod_base = um
  modified_base 8: mod_base = cm
  modified_base 9: mod_base = cm
  modified_base 10: mod_base = OTHER; note = 2'-O-methyladenosine
  modified_base 11: mod_base = um
  modified_base 12: mod_base = OTHER; note = 2'-fluorocytidine
  modified_base 13: mod_base = um
  modified_base 14: mod_base = OTHER; note = 2'-fluoroadenosine
  modified_base 15: mod_base = cm
  modified_base 16: mod_base = OTHER; note = 2'-fluoroadenosine
  modified_base 17: mod_base = um
  modified_base 18: mod_base = OTHER; note = 2'-fluoroadenosine
  modified_base 19: mod_base = gm
  modified_base 20: mod_base = gm
  modified_base 20^21: mod_base = OTHER; note = phosphorothioate linkage
  modified_base 21: mod_base = cm
  source 1..21: mol_type = other RNA
ttcgaatccatctacataggc

SEQ ID NO: 1354 - RNA, 21 nt, synthetic construct
  modified_base 1: mod_base = um
  modified_base 1^2: mod_base = OTHER; note = phosphorothioate linkage
  modified_base 2: mod_base = OTHER; note = 2'-fluoroguanosine
  modified_base 2^3: mod_base = OTHER; note = phosphorothioate linkage
  modified_base 3: mod_base = OTHER; note = 2'-O-methyladenosine
  modified_base 3^4: mod_base = OTHER; note = phosphorothioate linkage
  modified_base 4: mod_base = OTHER; note = 2'-fluorocytidine
  modified_base 5: mod_base = OTHER; note = 2'-O-methyladenosine
  modified_base 6: mod_base = OTHER; note = 2'-fluorouridine
  modified_base 7: mod_base = um
  modified_base 8: mod_base = um
  modified_base 9: mod_base = gm
  modified_base 10: mod_base = gm
  modified_base 11: mod_base = gm
  modified_base 12: mod_base = OTHER; note = 2'-fluoroadenosine
  modified_base 13: mod_base = OTHER; note = 2'-O-methyladenosine
  modified_base 14: mod_base = OTHER; note = 2'-fluoroadenosine
  modified_base 15: mod_base = gm
  modified_base 16: mod_base = OTHER; note = 2'-fluorocytidine
  modified_base 17: mod_base = um
  modified_base 18: mod_base = OTHER; note = 2'-fluorouridine
  modified_base 19: mod_base = gm
  modified_base 20: mod_base = cm
  modified_base 20^21: mod_base = OTHER; note = phosphorothioate linkage
  modified_base 21: mod_base = cm
  source 1..21: mol_type = other RNA
tgacatttgggaaagcttgcc

SEQ ID NO: 1355 - RNA, 21 nt, synthetic construct
  modified_base 1: mod_base = um
  modified_base 1^2: mod_base = OTHER; note = phosphorothioate linkage
  modified_base 2: mod_base = OTHER; note = 2'-fluorouridine
  modified_base 2^3: mod_base = OTHER; note = phosphorothioate linkage
  modified_base 3: mod_base = um
  modified_base 3^4: mod_base = OTHER; note = phosphorothioate linkage
  modified_base 4: mod_base = OTHER; note = 2'-fluoroguanosine
  modified_base 5: mod_base = OTHER; note = 2'-O-methyladenosine
  modified_base 6: mod_base = OTHER; note = 2'-fluorouridine
  modified_base 7: mod_base = um
  modified_base 8: mod_base = gm
  modified_base 9: mod_base = cm
  modified_base 10: mod_base = OTHER; note = 2'-O-methyladenosine
  modified_base 11: mod_base = um
  modified_base 12: mod_base = OTHER; note = 2'-fluorocytidine
  modified_base 13: mod_base = OTHER; note = 2'-O-methyladenosine
  modified_base 14: mod_base = OTHER; note = 2'-fluorouridine
  modified_base 15: mod_base = OTHER; note = 2'-O-methyladenosine
  modified_base 16: mod_base = OTHER; note = 2'-fluorouridine
  modified_base 17: mod_base = OTHER; note = 2'-O-methyladenosine
  modified_base 18: mod_base = OTHER; note = 2'-fluoroguanosine
  modified_base 19: mod_base = um
  modified_base 20: mod_base = gm
  modified_base 20^21: mod_base = OTHER; note = phosphorothioate linkage
  modified_base 21: mod_base = gm
  source 1..21: mol_type = other RNA
tttgattgcatcatatagtgg

SEQ ID NO: 1356 - RNA, 21 nt, synthetic construct
  modified_base 1: mod_base = OTHER; note = 2'-O-methyladenosine
  modified_base 1^2: mod_base = OTHER; note = phosphorothioate linkage
  modified_base 2: mod_base = OTHER; note = 2'-fluoroadenosine
  modified_base 2^3: mod_base = OTHER; note = phosphorothioate linkage
  modified_base 3: mod_base = gm
  modified_base 3^4: mod_base = OTHER; note = phosphorothioate linkage
  modified_base 4: mod_base = OTHER; note = 2'-fluoroguanosine
  modified_base 5: mod_base = um
  modified_base 6: mod_base = OTHER; note = 2'-fluorocytidine
  modified_base 7: mod_base = um
  modified_base 8: mod_base = cm
  modified_base 9: mod_base = cm
  modified_base 10: mod_base = OTHER; note = 2'-O-methyladenosine
  modified_base 11: mod_base = OTHER; note = 2'-O-methyladenosine
  modified_base 12: mod_base = OTHER; note = 2'-fluorocytidine
  modified_base 13: mod_base = OTHER; note = 2'-O-methyladenosine
  modified_base 14: mod_base = OTHER; note = 2'-fluorouridine
  modified_base 15: mod_base = cm
  modified_base 16: mod_base = OTHER; note = 2'-fluorouridine
  modified_base 17: mod_base = um
  modified_base 18: mod_base = OTHER; note = 2'-fluorouridine
  modified_base 19: mod_base = gm
  modified_base 20: mod_base = cm
  modified_base 20^21: mod_base = OTHER; note = phosphorothioate linkage
  modified_base 21: mod_base = OTHER; note = 2'-O-methyladenosine
  source 1..21: mol_type = other RNA
aaggtctccaacatctttgca

SEQ ID NO: 1357 - RNA, 21 nt, synthetic construct
  modified_base 1: mod_base = um
  modified_base 1^2: mod_base = OTHER; note = phosphorothioate linkage
  modified_base 2: mod_base = OTHER; note = 2'-fluorocytidine
  modified_base 2^3: mod_base = OTHER; note = phosphorothioate linkage
  modified_base 3: mod_base = OTHER; note = 2'-O-methyladenosine
  modified_base 3^4: mod_base = OTHER; note = phosphorothioate linkage
  modified_base 4: mod_base = OTHER; note = 2'-fluorouridine
  modified_base 5: mod_base = cm
  modified_base 6: mod_base = OTHER; note = 2'-fluoroadenosine
  modified_base 7: mod_base = OTHER; note = 2'-O-methyladenosine
  modified_base 8: mod_base = gm
  modified_base 9: mod_base = um
  modified_base 10: mod_base = um
  modified_base 11: mod_base = cm
  modified_base 12: mod_base = OTHER; note = 2'-fluorouridine
  modified_base 13: mod_base = OTHER; note = 2'-O-methyladenosine
  modified_base 14: mod_base = OTHER; note = 2'-fluorouridine
  modified_base 15: mod_base = cm
  modified_base 16: mod_base = OTHER; note = 2'-fluorocytidine
  modified_base 17: mod_base = OTHER; note = 2'-O-methyladenosine
  modified_base 18: mod_base = OTHER; note = 2'-fluoroguanosine
  modified_base 19: mod_base = cm
  modified_base 20: mod_base = um
  modified_base 20^21: mod_base = OTHER; note = phosphorothioate linkage
  modified_base 21: mod_base = um
  source 1..21: mol_type = other RNA
tcatcaagttctatccagctt

SEQ ID NO: 1358 - RNA, 21 nt, synthetic construct
  modified_base 1: mod_base = OTHER; note = 2'-O-methyladenosine
  modified_base 1^2: mod_base = OTHER; note = phosphorothioate linkage
  modified_base 2: mod_base = OTHER; note = 2'-fluorocytidine
  modified_base 2^3: mod_base = OTHER; note = phosphorothioate linkage
  modified_base 3: mod_base = OTHER; note = 2'-O-methyladenosine
  modified_base 3^4: mod_base = OTHER; note = phosphorothioate linkage
  modified_base 4: mod_base = OTHER; note = 2'-fluorouridine
  modified_base 5: mod_base = um
  modified_base 6: mod_base = OTHER; note = 2'-fluorouridine
  modified_base 7: mod_base = gm
  modified_base 8: mod_base = cm
  modified_base 9: mod_base = um
  modified_base 10: mod_base = um
  modified_base 11: mod_base = OTHER; note = 2'-O-methyladenosine
  modified_base 12: mod_base = OTHER; note = 2'-fluorouridine
  modified_base 13: mod_base = cm
  modified_base 14: mod_base = OTHER; note = 2'-fluoroadenosine
  modified_base 15: mod_base = um
  modified_base 16: mod_base = OTHER; note = 2'-fluorouridine
  modified_base 17: mod_base = gm
  modified_base 18: mod_base = OTHER; note = 2'-fluoroguanosine
  modified_base 19: mod_base = gm
  modified_base 20: mod_base = OTHER; note = 2'-O-methyladenosine
  modified_base 20^21: mod_base = OTHER; note = phosphorothioate linkage
  modified_base 21: mod_base = um
  source 1..21: mol_type = other RNA
acatttgcttatcattgggat

SEQ ID NO: 1359 - RNA, 21 nt, synthetic construct
  modified_base 1: mod_base = um
  modified_base 1^2: mod_base = OTHER; note = phosphorothioate linkage
  modified_base 2: mod_base = OTHER; note = 2'-fluorocytidine
  modified_base 2^3: mod_base = OTHER; note = phosphorothioate linkage
  modified_base 3: mod_base = OTHER; note = 2'-O-methyladenosine
  modified_base 3^4: mod_base = OTHER; note = phosphorothioate linkage
  modified_base 4: mod_base = OTHER; note = 2'-fluorouridine
  modified_base 5: mod_base = um
  modified_base 6: mod_base = OTHER; note = 2'-fluoroadenosine
  modified_base 7: mod_base = OTHER; note = 2'-O-methyladenosine
  modified_base 8: mod_base = um
  modified_base 9: mod_base = cm
  modified_base 10: mod_base = OTHER; note = 2'-O-methyladenosine
  modified_base 11: mod_base = gm
  modified_base 12: mod_base = OTHER; note = 2'-fluoroguanosine
  modified_base 13: mod_base = cm
  modified_base 14: mod_base = OTHER; note = 2'-fluoroadenosine
  modified_base 15: mod_base = cm
  modified_base 16: mod_base = OTHER; note = 2'-fluorouridine
  modified_base 17: mod_base = cm
  modified_base 18: mod_base = OTHER; note = 2'-fluorocytidine
  modified_base 19: mod_base = um
  modified_base 20: mod_base = cm
  modified_base 20^21: mod_base = OTHER; note = phosphorothioate linkage
  modified_base 21: mod_base = gm
  source 1..21: mol_type = other RNA
tcattaatcaggcactcctcg

SEQ ID NO: 1360 - RNA, 21 nt, synthetic construct
  modified_base 1: mod_base = OTHER; note = 5'-cyclopropyl phosphonate-2'-O-methyluridine
  modified_base 1^2: mod_base = OTHER; note = phosphorothioate linkage
  modified_base 2: mod_base = OTHER; note = 2'-fluoroadenosine
  modified_base 2^3: mod_base = OTHER; note = phosphorothioate linkage
  modified_base 3: mod_base = OTHER; note = 2'-O-methyladenosine
  modified_base 3^4: mod_base = OTHER; note = phosphorothioate linkage
  modified_base 4: mod_base = OTHER; note = 2'-fluoroguanosine
  modified_base 5: mod_base = cm
  modified_base 6: mod_base = OTHER; note = 2'-fluoroadenosine
  modified_base 7: mod_base = um
  modified_base 8: mod_base = um
  modified_base 9: mod_base = gm
  modified_base 10: mod_base = um
  modified_base 11: mod_base = cm
  modified_base 12: mod_base = OTHER; note = 2'-fluoroguanosine
  modified_base 13: mod_base = cm
  modified_base 14: mod_base = OTHER; note = 2'-fluoroadenosine
  modified_base 15: mod_base = cm
  modified_base 16: mod_base = OTHER; note = 2'-fluoroadenosine
  modified_base 17: mod_base = OTHER; note = 2'-O-methyladenosine
  modified_base 18: mod_base = OTHER; note = 2'-fluoroadenosine
  modified_base 19: mod_base = gm
  modified_base 20: mod_base = um
  modified_base 20^21: mod_base = OTHER; note = phosphorothioate linkage
  modified_base 21: mod_base = cm
  source 1..21: mol_type = other RNA
taagcattgtcgcacaaagtc

SEQ ID NO: 1361 - RNA, 21 nt, synthetic construct
  modified_base 1: mod_base = OTHER; note = 5'-cyclopropyl phosphonate-2'-O-methyluridine
  modified_base 1^2: mod_base = OTHER; note = phosphorothioate linkage
  modified_base 2: mod_base = OTHER; note = 2'-fluorouridine
  modified_base 2^3: mod_base = OTHER; note = phosphorothioate linkage
  modified_base 3: mod_base = um
  modified_base 3^4: mod_base = OTHER; note = phosphorothioate linkage
  modified_base 4: mod_base = OTHER; note = 2'-fluoroguanosine
  modified_base 5: mod_base = OTHER; note = 2'-O-methyladenosine
  modified_base 6: mod_base = OTHER; note = 2'-fluorouridine
  modified_base 7: mod_base = um
  modified_base 8: mod_base = gm
  modified_base 9: mod_base = cm
  modified_base 10: mod_base = OTHER; note = 2'-O-methyladenosine
  modified_base 11: mod_base = um
  modified_base 12: mod_base = OTHER; note = 2'-fluorocytidine
  modified_base 13: mod_base = OTHER; note = 2'-O-methyladenosine
  modified_base 14: mod_base = OTHER; note = 2'-fluorouridine
  modified_base 15: mod_base = OTHER; note = 2'-O-methyladenosine
  modified_base 16: mod_base = OTHER; note = 2'-fluorouridine
  modified_base 17: mod_base = OTHER; note = 2'-O-methyladenosine
  modified_base 18: mod_base = OTHER; note = 2'-fluoroguanosine
  modified_base 19: mod_base = um
  modified_base 20: mod_base = gm
  modified_base 20^21: mod_base = OTHER; note = phosphorothioate linkage
  modified_base 21: mod_base = gm
  source 1..21: mol_type = other RNA
tttgattgcatcatatagtgg

SEQ ID NO: 1362 - RNA, 21 nt, synthetic construct
  modified_base 1: mod_base = OTHER; note = 5'-cyclopropyl phosphonate-2'-O-methyluridine
  modified_base 1^2: mod_base = OTHER; note = phosphorothioate linkage
  modified_base 2: mod_base = OTHER; note = 2'-fluoroguanosine
  modified_base 2^3: mod_base = OTHER; note = phosphorothioate linkage
  modified_base 3: mod_base = OTHER; note = 2'-O-methyladenosine
  modified_base 3^4: mod_base = OTHER; note = phosphorothioate linkage
  modified_base 4: mod_base = OTHER; note = 2'-fluoroadenosine
  modified_base 5: mod_base = OTHER; note = 2'-O-methyladenosine
  modified_base 6: mod_base = OTHER; note = 2'-fluoroadenosine
  modified_base 7: mod_base = gm
  modified_base 8: mod_base = cm
  modified_base 9: mod_base = cm
  modified_base 10: mod_base = um
  modified_base 11: mod_base = OTHER; note = 2'-O-methyladenosine
  modified_base 12: mod_base = OTHER; note = 2'-fluoroguanosine
  modified_base 13: mod_base = um
  modified_base 14: mod_base = OTHER; note = 2'-fluorouridine
  modified_base 15: mod_base = um
  modified_base 16: mod_base = OTHER; note = 2'-fluorouridine
  modified_base 17: mod_base = gm
  modified_base 18: mod_base = OTHER; note = 2'-fluoroadenosine
  modified_base 19: mod_base = um
  modified_base 20: mod_base = um
  modified_base 20^21: mod_base = OTHER; note = phosphorothioate linkage
  modified_base 21: mod_base = cm
  source 1..21: mol_type = other RNA
tgaaaagcctagttttgattc

SEQ ID NO: 1363 - RNA, 21 nt, synthetic construct
  modified_base 1: mod_base = OTHER; note = 5'-cyclopropyl phosphonate-2'-O-methyladenosine
  modified_base 1^2: mod_base = OTHER; note = phosphorothioate linkage
  modified_base 2: mod_base = OTHER; note = 2'-fluoroadenosine
  modified_base 2^3: mod_base = OTHER; note = phosphorothioate linkage
  modified_base 3: mod_base = gm
  modified_base 3^4: mod_base = OTHER; note = phosphorothioate linkage
  modified_base 4: mod_base = OTHER; note = 2'-fluoroguanosine
  modified_base 5: mod_base = um
  modified_base 6: mod_base = OTHER; note = 2'-fluorocytidine
  modified_base 7: mod_base = um
  modified_base 8: mod_base = cm
  modified_base 9: mod_base = cm
  modified_base 10: mod_base = OTHER; note = 2'-O-methyladenosine
  modified_base 11: mod_base = OTHER; note = 2'-O-methyladenosine
  modified_base 12: mod_base = OTHER; note = 2'-fluorocytidine
  modified_base 13: mod_base = OTHER; note = 2'-O-methyladenosine
  modified_base 14: mod_base = OTHER; note = 2'-fluorouridine
  modified_base 15: mod_base = cm
  modified_base 16: mod_base = OTHER; note = 2'-fluorouridine
  modified_base 17: mod_base = um
  modified_base 18: mod_base = OTHER; note = 2'-fluorouridine
  modified_base 19: mod_base = gm
  modified_base 20: mod_base = cm
  modified_base 20^21: mod_base = OTHER; note = phosphorothioate linkage
  modified_base 21: mod_base = OTHER; note = 2'-O-methyladenosine
  source 1..21: mol_type = other RNA
aaggtctccaacatctttgca

SEQ ID NO: 1364 - RNA, 21 nt, synthetic construct
  modified_base 1: mod_base = OTHER; note = 5'-cyclopropyl phosphonate-2'-O-methyluridine
  modified_base 1^2: mod_base = OTHER; note = phosphorothioate linkage
  modified_base 2: mod_base = OTHER; note = 2'-fluorocytidine
  modified_base 2^3: mod_base = OTHER; note = phosphorothioate linkage
  modified_base 3: mod_base = OTHER; note = 2'-O-methyladenosine
  modified_base 3^4: mod_base = OTHER; note = phosphorothioate linkage
  modified_base 4: mod_base = OTHER; note = 2'-fluorouridine
  modified_base 5: mod_base = um
  modified_base 6: mod_base = OTHER; note = 2'-fluoroadenosine
  modified_base 7: mod_base = OTHER; note = 2'-O-methyladenosine
  modified_base 8: mod_base = um
  modified_base 9: mod_base = cm
  modified_base 10: mod_base = OTHER; note = 2'-O-methyladenosine
  modified_base 11: mod_base = gm
  modified_base 12: mod_base = OTHER; note = 2'-fluoroguanosine
  modified_base 13: mod_base = cm
  modified_base 14: mod_base = OTHER; note = 2'-fluoroadenosine
  modified_base 15: mod_base = cm
  modified_base 16: mod_base = OTHER; note = 2'-fluorouridine
  modified_base 17: mod_base = cm
  modified_base 18: mod_base = OTHER; note = 2'-fluorocytidine
  modified_base 19: mod_base = um
  modified_base 20: mod_base = cm
  modified_base 20^21: mod_base = OTHER; note = phosphorothioate linkage
  modified_base 21: mod_base = gm
  source 1..21: mol_type = other RNA
tcattaatcaggcactcctcg

SEQ ID NO: 1365 - RNA, 21 nt, synthetic construct
  modified_base 1: mod_base = OTHER; note = 5'-cyclopropyl phosphonate-2'-O-methyluridine
  modified_base 1^2: mod_base = OTHER; note = phosphorothioate linkage
  modified_base 2: mod_base = OTHER; note = 2'-fluoroguanosine
  modified_base 2^3: mod_base = OTHER; note = phosphorothioate linkage
  modified_base 3: mod_base = OTHER; note = 2'-O-methyladenosine
  modified_base 3^4: mod_base = OTHER; note = phosphorothioate linkage
  modified_base 4: mod_base = OTHER; note = 2'-fluoroadenosine
  modified_base 5: mod_base = OTHER; note = 2'-O-methyladenosine
  modified_base 6: mod_base = OTHER; note = 2'-fluorouridine
  modified_base 7: mod_base = gm
  modified_base 8: mod_base = gm
  modified_base 9: mod_base = OTHER; note = 2'-O-methyladenosine
  modified_base 10: mod_base = OTHER; note = 2'-O-methyladenosine
  modified_base 11: mod_base = OTHER; note = 2'-O-methyladenosine
  modified_base 12: mod_base = OTHER; note = 2'-fluorouridine
  modified_base 13: mod_base = cm
  modified_base 14: mod_base = OTHER; note = 2'-fluorocytidine
  modified_base 15: mod_base = gm
  modified_base 16: mod_base = OTHER; note = 2'-fluoroadenosine
  modified_base 17: mod_base = OTHER; note = 2'-O-methyladenosine
  modified_base 18: mod_base = OTHER; note = 2'-fluorouridine
  modified_base 19: mod_base = OTHER; note = 2'-O-methyladenosine
  modified_base 20: mod_base = cm
  modified_base 20^21: mod_base = OTHER; note = phosphorothioate linkage
  modified_base 21: mod_base = cm
  source 1..21: mol_type = other RNA
tgaaatggaaatccgaatacc

SEQ ID NO: 1366 - RNA, 21 nt, synthetic construct
  modified_base 1: mod_base = OTHER; note = 5'-cyclopropyl phosphonate-2'-O-methyluridine
  modified_base 1^2: mod_base = OTHER; note = phosphorothioate linkage
  modified_base 2: mod_base = OTHER; note = 2'-fluorouridine
  modified_base 2^3: mod_base = OTHER; note = phosphorothioate linkage
  modified_base 3: mod_base = cm
  modified_base 3^4: mod_base = OTHER; note = phosphorothioate linkage
  modified_base 4: mod_base = OTHER; note = 2'-fluoroguanosine
  modified_base 5: mod_base = OTHER; note = 2'-O-methyladenosine
  modified_base 6: mod_base = OTHER; note = 2'-fluoroadenosine
  modified_base 7: mod_base = um
  modified_base 8: mod_base = cm
  modified_base 9: mod_base = cm
  modified_base 10: mod_base = OTHER; note = 2'-O-methyladenosine
  modified_base 11: mod_base = um
  modified_base 12: mod_base = OTHER; note = 2'-fluorocytidine
  modified_base 13: mod_base = um
  modified_base 14: mod_base = OTHER; note = 2'-fluoroadenosine
  modified_base 15: mod_base = cm
  modified_base 16: mod_base = OTHER; note = 2'-fluoroadenosine
  modified_base 17: mod_base = um
  modified_base 18: mod_base = OTHER; note = 2'-fluoroadenosine
  modified_base 19: mod_base = gm
  modified_base 20: mod_base = gm
  modified_base 20^21: mod_base = OTHER; note = phosphorothioate linkage
  modified_base 21: mod_base = cm
  source 1..21: mol_type = other RNA
ttcgaatccatctacataggc

SEQ ID NO: 1367 - RNA, 21 nt, synthetic construct
  modified_base 1: mod_base = OTHER; note = 5'-cyclopropyl phosphonate-2'-O-methyladenosine
  modified_base 1^2: mod_base = OTHER; note = phosphorothioate linkage
  modified_base 2: mod_base = OTHER; note = 2'-fluorocytidine
  modified_base 2^3: mod_base = OTHER; note = phosphorothioate linkage
  modified_base 3: mod_base = OTHER; note = 2'-O-methyladenosine
  modified_base 3^4: mod_base = OTHER; note = phosphorothioate linkage
  modified_base 4: mod_base = OTHER; note = 2'-fluorouridine
  modified_base 5: mod_base = um
  modified_base 6: mod_base = OTHER; note = 2'-fluorouridine
  modified_base 7: mod_base = gm
  modified_base 8: mod_base = cm
  modified_base 9: mod_base = um
  modified_base 10: mod_base = um
  modified_base 11: mod_base = OTHER; note = 2'-O-methyladenosine
  modified_base 12: mod_base = OTHER; note = 2'-fluorouridine
  modified_base 13: mod_base = cm
  modified_base 14: mod_base = OTHER; note = 2'-fluoroadenosine
  modified_base 15: mod_base = um
  modified_base 16: mod_base = OTHER; note = 2'-fluorouridine
  modified_base 17: mod_base = gm
  modified_base 18: mod_base = OTHER; note = 2'-fluoroguanosine
  modified_base 19: mod_base = gm
  modified_base 20: mod_base = OTHER; note = 2'-O-methyladenosine
  modified_base 20^21: mod_base = OTHER; note = phosphorothioate linkage
  modified_base 21: mod_base = um
  source 1..21: mol_type = other RNA
acatttgcttatcattgggat

SEQ ID NO: 1368 - RNA, 21 nt, synthetic construct
  modified_base 1: mod_base = cm
  modified_base 1^2: mod_base = OTHER; note = phosphorothioate linkage
  modified_base 2: mod_base = um
  modified_base 3: mod_base = OTHER; note = 2'-O-methyladenosine
  modified_base 4: mod_base = OTHER; note = 2'-O-methyladenosine
  modified_base 5: mod_base = cm
  modified_base 6: mod_base = cm
  modified_base 7: mod_base = gm
  modified_base 8: mod_base = OTHER; note = 2'-O-methyladenosine
  modified_base 9: mod_base = OTHER; note = 2'-fluoroguanosine
  modified_base 10: mod_base = OTHER; note = 2'-fluoroguanosine
  modified_base 11: mod_base = OTHER; note = 2'-fluorouridine
  modified_base 12: mod_base = cm
  modified_base 13: mod_base = gm
  modified_base 14: mod_base = OTHER; note = 2'-O-methyladenosine
  modified_base 15: mod_base = OTHER; note = 2'-O-methyladenosine
  modified_base 16: mod_base = OTHER; note = 2'-O-methyladenosine
  modified_base 17: mod_base = cm
  modified_base 18: mod_base = gm
  modified_base 19: mod_base = um
  modified_base 20: mod_base = OTHER; note = 2'-O-methyladenosine
  modified_base 21: mod_base = OTHER; note = 2'-O-methyladenosine
  source 1..21: mol_type = other RNA
ctaaccgaggtcgaaacgtaa

SEQ ID NO: 1369 - RNA, 21 nt, synthetic construct
  modified_base 1: mod_base = OTHER; note = 2'-O-methyladenosine
  modified_base 1^2: mod_base = OTHER; note = phosphorothioate linkage
  modified_base 2: mod_base = cm
  modified_base 3: mod_base = gm
  modified_base 4: mod_base = um
  modified_base 5: mod_base = OTHER; note = 2'-O-methyladenosine
  modified_base 6: mod_base = cm
  modified_base 7: mod_base = gm
  modified_base 8: mod_base = um
  modified_base 9: mod_base = OTHER; note = 2'-fluorouridine
  modified_base 10: mod_base = OTHER; note = 2'-fluorocytidine
  modified_base 11: mod_base = OTHER; note = 2'-fluorouridine
  modified_base 12: mod_base = um
  modified_base 13: mod_base = um
  modified_base 14: mod_base = cm
  modified_base 15: mod_base = um
  modified_base 16: mod_base = OTHER; note = 2'-O-methyladenosine
  modified_base 17: mod_base = um
  modified_base 18: mod_base = cm
  modified_base 19: mod_base = OTHER; note = 2'-O-methyladenosine
  modified_base 20: mod_base = um
  modified_base 21: mod_base = OTHER; note = 2'-O-methyladenosine
  source 1..21: mol_type = other RNA
acgtacgttctttctatcata

SEQ ID NO: 1370 - RNA, 21 nt, synthetic construct
  modified_base 1: mod_base = gm
  modified_base 1^2: mod_base = OTHER; note = phosphorothioate linkage
  modified_base 2: mod_base = um
  modified_base 3: mod_base = um
  modified_base 4: mod_base = gm
  modified_base 5: mod_base = OTHER; note = 2'-O-methyladenosine
  modified_base 6: mod_base = cm
  modified_base 7: mod_base = gm
  modified_base 8: mod_base = OTHER; note = 2'-O-methyladenosine
  modified_base 9: mod_base = OTHER; note = 2'-fluorouridine
  modified_base 10: mod_base = OTHER; note = 2'-fluoroguanosine
  modified_base 11: mod_base = OTHER; note = 2'-fluoroguanosine
  modified_base 12: mod_base = um
  modified_base 13: mod_base = cm
  modified_base 14: mod_base = OTHER; note = 2'-O-methyladenosine
  modified_base 15: mod_base = um
  modified_base 16: mod_base = um
  modified_base 17: mod_base = um
  modified_base 18: mod_base = um
  modified_base 19: mod_base = gm
  modified_base 20: mod_base = um
  modified_base 21: mod_base = OTHER; note = 2'-O-methyladenosine
  source 1..21: mol_type = other RNA
gttgacgatggtcattttgta

SEQ ID NO: 1371 - RNA, 21 nt, synthetic construct
  modified_base 1: mod_base = gm
  modified_base 1^2: mod_base = OTHER; note = phosphorothioate linkage
  modified_base 2: mod_base = um
  modified_base 3: mod_base = gm
  modified_base 4: mod_base = OTHER; note = 2'-O-methyladenosine
  modified_base 5: mod_base = cm
  modified_base 6: mod_base = gm
  modified_base 7: mod_base = OTHER; note = 2'-O-methyladenosine
  modified_base 8: mod_base = um
  modified_base 9: mod_base = OTHER; note = 2'-fluoroguanosine
  modified_base 10: mod_base = OTHER; note = 2'-fluoroguanosine
  modified_base 11: mod_base = OTHER; note = 2'-fluorouridine
  modified_base 12: mod_base = cm
  modified_base 13: mod_base = OTHER; note = 2'-O-methyladenosine
  modified_base 14: mod_base = um
  modified_base 15: mod_base = um
  modified_base 16: mod_base = um
  modified_base 17: mod_base = um
  modified_base 18: mod_base = gm
  modified_base 19: mod_base = um
  modified_base 20: mod_base = cm
  modified_base 21: mod_base = OTHER; note = 2'-O-methyladenosine
  source 1..21: mol_type = other RNA
gtgacgatggtcattttgtca

SEQ ID NO: 1372 - RNA, 21 nt, synthetic construct
  modified_base 1: mod_base = cm
  modified_base 1^2: mod_base = OTHER; note = phosphorothioate linkage
  modified_base 2: mod_base = um
  modified_base 3: mod_base = OTHER; note = 2'-O-methyladenosine
  modified_base 4: mod_base = OTHER; note = 2'-O-methyladenosine
  modified_base 5: mod_base = cm
  modified_base 6: mod_base = cm
  modified_base 7: mod_base = gm
  modified_base 8: mod_base = OTHER; note = 2'-O-methyladenosine
  modified_base 9: mod_base = OTHER; note = 2'-fluoroguanosine
  modified_base 10: mod_base = OTHER; note = 2'-fluoroguanosine
  modified_base 11: mod_base = OTHER; note = 2'-fluorouridine
  modified_base 12: mod_base = cm
  modified_base 13: mod_base = gm
  modified_base 14: mod_base = OTHER; note = 2'-O-methyladenosine
  modified_base 15: mod_base = OTHER; note = 2'-O-methyladenosine
  modified_base 16: mod_base = OTHER; note = 2'-O-methyladenosine
  modified_base 17: mod_base = cm
  modified_base 18: mod_base = gm
  modified_base 19: mod_base = um
  modified_base 20: mod_base = OTHER; note = 2'-O-methyladenosine
  modified_base 21: mod_base = OTHER; note = 2'-O-methyladenosine
  source 1..21: mol_type = other RNA
ctaaccgaggtcgaaacgtaa

SEQ ID NO: 1373 - RNA, 21 nt, synthetic construct
  modified_base 1: mod_base = cm
  modified_base 1^2: mod_base = OTHER; note = phosphorothioate linkage
  modified_base 2: mod_base = um
  modified_base 3: mod_base = OTHER; note = 2'-O-methyladenosine
  modified_base 4: mod_base = OTHER; note = 2'-O-methyladenosine
  modified_base 5: mod_base = cm
  modified_base 6: mod_base = cm
  modified_base 7: mod_base = gm
  modified_base 8: mod_base = OTHER; note = 2'-O-methyladenosine
  modified_base 9: mod_base = OTHER; note = 2'-fluoroguanosine
  modified_base 10: mod_base = gm
  modified_base 11: mod_base = OTHER; note = 2'-fluorouridine
  modified_base 12: mod_base = cm
  modified_base 13: mod_base = OTHER; note = 2'-fluoroguanosine
  modified_base 14: mod_base = OTHER; note = 2'-O-methyladenosine
  modified_base 15: mod_base = OTHER; note = 2'-O-methyladenosine
  modified_base 16: mod_base = OTHER; note = 2'-O-methyladenosine
  modified_base 17: mod_base = cm
  modified_base 18: mod_base = gm
  modified_base 19: mod_base = um
  modified_base 20: mod_base = OTHER; note = 2'-O-methyladenosine
  modified_base 21: mod_base = OTHER; note = 2'-O-methyladenosine
  source 1..21: mol_type = other RNA
ctaaccgaggtcgaaacgtaa

SEQ ID NO: 1374 - RNA, 21 nt, synthetic construct
  modified_base 1: mod_base = cm
  modified_base 1^2: mod_base = OTHER; note = phosphorothioate linkage
  modified_base 2: mod_base = um
  modified_base 3: mod_base = OTHER; note = 2'-O-methyladenosine
  modified_base 4: mod_base = OTHER; note = 2'-O-methyladenosine
  modified_base 5: mod_base = cm
  modified_base 6: mod_base = cm
  modified_base 7: mod_base = gm
  modified_base 8: mod_base = OTHER; note = 2'-O-methyladenosine
  modified_base 9: mod_base = OTHER; note = 2'-fluoroguanosine
  modified_base 10: mod_base = gm
  modified_base 11: mod_base = OTHER; note = 2'-fluorouridine
  modified_base 12: mod_base = cm
  modified_base 13: mod_base = gm
  modified_base 14: mod_base = OTHER; note = 2'-O-methyladenosine
  modified_base 15: mod_base = OTHER; note = 2'-O-methyladenosine
  modified_base 16: mod_base = OTHER; note = 2'-O-methyladenosine
  modified_base 17: mod_base = cm
  modified_base 18: mod_base = gm
  modified_base 19: mod_base = um
  modified_base 20: mod_base = OTHER; note = 2'-O-methyladenosine
  modified_base 21: mod_base = OTHER; note = 2'-O-methyladenosine
  source 1..21: mol_type = other RNA
ctaaccgaggtcgaaacgtaa

SEQ ID NO: 1375 - RNA, 21 nt, synthetic construct
  modified_base 1: mod_base = cm
  modified_base 1^2: mod_base = OTHER; note = phosphorothioate linkage
  modified_base 2: mod_base = cm
  modified_base 3: mod_base = cm
  modified_base 4: mod_base = gm
  modified_base 5: mod_base = OTHER; note = 2'-O-methyladenosine
  modified_base 6: mod_base = OTHER; note = 2'-O-methyladenosine
  modified_base 7: mod_base = cm
  modified_base 8: mod_base = OTHER; note = 2'-O-methyladenosine
  modified_base 9: mod_base = OTHER; note = 2'-fluoroadenosine
  modified_base 10: mod_base = OTHER; note = 2'-fluorocytidine
  modified_base 11: mod_base = OTHER; note = 2'-fluoroadenosine
  modified_base 12: mod_base = um
  modified_base 13: mod_base = gm
  modified_base 14: mod_base = gm
  modified_base 15: mod_base = OTHER; note = 2'-O-methyladenosine
  modified_base 16: mod_base = um
  modified_base 17: mod_base = OTHER; note = 2'-O-methyladenosine
  modified_base 18: mod_base = gm
  modified_base 19: mod_base = OTHER; note = 2'-O-methyladenosine
  modified_base 20: mod_base = gm
  modified_base 21: mod_base = OTHER; note = 2'-O-methyladenosine
  source 1..21: mol_type = other RNA
cccgaacaacatggatagaga

SEQ ID NO: 1376 - RNA, 21 nt, synthetic construct
  modified_base 1: mod_base = gm
  modified_base 1^2: mod_base = OTHER; note = phosphorothioate linkage
  modified_base 2: mod_base = OTHER; note = 2'-O-methyladenosine
  modified_base 3: mod_base = cm
  modified_base 4: mod_base = OTHER; note = 2'-O-methyladenosine
  modified_base 5: mod_base = OTHER; note = 2'-O-methyladenosine
  modified_base 6: mod_base = cm
  modified_base 7: mod_base = OTHER; note = 2'-O-methyladenosine
  modified_base 8: mod_base = um
  modified_base 9: mod_base = OTHER; note = 2'-fluoroguanosine
  modified_base 10: mod_base = OTHER; note = 2'-fluoroguanosine
  modified_base 11: mod_base = OTHER; note = 2'-fluoroadenosine
  modified_base 12: mod_base = um
  modified_base 13: mod_base = OTHER; note = 2'-O-methyladenosine
  modified_base 14: mod_base = gm
  modified_base 15: mod_base = OTHER; note = 2'-O-methyladenosine
  modified_base 16: mod_base = OTHER; note = 2 -O-methylinosine
  modified_base 17: mod_base = cm
  modified_base 18: mod_base = OTHER; note = 2'-O-methyladenosine
  modified_base 19: mod_base = gm
  modified_base 20: mod_base = um
  modified_base 21: mod_base = um
  source 1..21: mol_type = other RNA
gacaacatggatagancagtt

SEQ ID NO: 1377 - RNA, 21 nt, synthetic construct
  modified_base 1: mod_base = OTHER; note = 2 -O-methyl-2-aminoadenosine
  modified_base 1^2: mod_base = OTHER; note = phosphorothioate linkage
  modified_base 2: mod_base = cm
  modified_base 3: mod_base = gm
  modified_base 4: mod_base = um
  modified_base 5: mod_base = OTHER; note = 2'-O-methyladenosine
  modified_base 6: mod_base = cm
  modified_base 7: mod_base = gm
  modified_base 8: mod_base = um
  modified_base 9: mod_base = OTHER; note = 2'-fluorouridine
  modified_base 10: mod_base = OTHER; note = 2'-fluorocytidine
  modified_base 11: mod_base = OTHER; note = 2'-fluorouridine
  modified_base 12: mod_base = um
  modified_base 13: mod_base = um
  modified_base 14: mod_base = cm
  modified_base 15: mod_base = um
  modified_base 16: mod_base = OTHER; note = 2'-O-methyladenosine
  modified_base 17: mod_base = um
  modified_base 18: mod_base = cm
  modified_base 19: mod_base = OTHER; note = 2'-O-methyladenosine
  modified_base 20: mod_base = um
  modified_base 21: mod_base = OTHER; note = 2'-O-methyladenosine
  source 1..21: mol_type = other RNA
acgtacgttctttctatcata

SEQ ID NO: 1378 - RNA, 21 nt, synthetic construct
  modified_base 1: mod_base = OTHER; note = 2'-O-methyladenosine
  modified_base 1^2: mod_base = OTHER; note = phosphorothioate linkage
  modified_base 2: mod_base = cm
  modified_base 3: mod_base = gm
  modified_base 4: mod_base = um
  modified_base 5: mod_base = OTHER; note = 2'-O-methyladenosine
  modified_base 6: mod_base = cm
  modified_base 7: mod_base = gm
  modified_base 8: mod_base = um
  modified_base 9: mod_base = OTHER; note = 2'-fluorouridine
  modified_base 10: mod_base = cm
  modified_base 11: mod_base = OTHER; note = 2'-fluorouridine
  modified_base 12: mod_base = um
  modified_base 13: mod_base = OTHER; note = 2'-fluorouridine
  modified_base 14: mod_base = cm
  modified_base 15: mod_base = um
  modified_base 16: mod_base = OTHER; note = 2'-O-methyladenosine
  modified_base 17: mod_base = um
  modified_base 18: mod_base = cm
  modified_base 19: mod_base = OTHER; note = 2'-O-methyladenosine
  modified_base 20: mod_base = um
  modified_base 21: mod_base = OTHER; note = 2'-O-methyladenosine
  source 1..21: mol_type = other RNA
acgtacgttctttctatcata

SEQ ID NO: 1379 - RNA, 21 nt, synthetic construct
  modified_base 1: mod_base = OTHER; note = 2'-O-methyladenosine
  modified_base 1^2: mod_base = OTHER; note = phosphorothioate linkage
  modified_base 2: mod_base = cm
  modified_base 3: mod_base = gm
  modified_base 4: mod_base = um
  modified_base 5: mod_base = OTHER; note = 2'-O-methyladenosine
  modified_base 6: mod_base = cm
  modified_base 7: mod_base = gm
  modified_base 8: mod_base = um
  modified_base 9: mod_base = OTHER; note = 2'-fluorouridine
  modified_base 10: mod_base = cm
  modified_base 11: mod_base = OTHER; note = 2'-fluorouridine
  modified_base 12: mod_base = OTHER; note = 2'-fluorouridine
  modified_base 13: mod_base = um
  modified_base 14: mod_base = cm
  modified_base 15: mod_base = um
  modified_base 16: mod_base = OTHER; note = 2'-O-methyladenosine
  modified_base 17: mod_base = um
  modified_base 18: mod_base = cm
  modified_base 19: mod_base = OTHER; note = 2'-O-methyladenosine
  modified_base 20: mod_base = um
  modified_base 21: mod_base = OTHER; note = 2'-O-methyladenosine
  source 1..21: mol_type = other RNA
acgtacgttctttctatcata

SEQ ID NO: 1380 - RNA, 21 nt, synthetic construct
  modified_base 1: mod_base = gm
  modified_base 1^2: mod_base = OTHER; note = phosphorothioate linkage
  modified_base 2: mod_base = OTHER; note = 2'-O-methyladenosine
  modified_base 3: mod_base = um
  modified_base 4: mod_base = OTHER; note = 2'-O-methyladenosine
  modified_base 5: mod_base = cm
  modified_base 6: mod_base = OTHER; note = 2'-O-methyladenosine
  modified_base 7: mod_base = gm
  modified_base 8: mod_base = OTHER; note = 2'-O-methyladenosine
  modified_base 9: mod_base = OTHER; note = 2'-fluoroguanosine
  modified_base 10: mod_base = OTHER; note = 2'-fluoroadenosine
  modified_base 11: mod_base = OTHER; note = 2'-fluorouridine
  modified_base 12: mod_base = um
  modified_base 13: mod_base = cm
  modified_base 14: mod_base = gm
  modified_base 15: mod_base = cm
  modified_base 16: mod_base = um
  modified_base 17: mod_base = um
  modified_base 18: mod_base = OTHER; note = 2 -O-methylinosine
  modified_base 19: mod_base = gm
  modified_base 20: mod_base = OTHER; note = 2'-O-methyladenosine
  modified_base 21: mod_base = OTHER; note = 2'-O-methyladenosine
  source 1..21: mol_type = other RNA
gatacagagattcgcttngaa

SEQ ID NO: 1381 - RNA, 21 nt, synthetic construct
  modified_base 1: mod_base = OTHER; note = 2'-O-methyladenosine
  modified_base 1^2: mod_base = OTHER; note = phosphorothioate linkage
  modified_base 2: mod_base = gm
  modified_base 3: mod_base = cm
  modified_base 4: mod_base = um
  modified_base 5: mod_base = um
  modified_base 6: mod_base = um
  modified_base 7: mod_base = cm
  modified_base 8: mod_base = um
  modified_base 9: mod_base = OTHER; note = 2'-fluorocytidine
  modified_base 10: mod_base = OTHER; note = 2'-fluoroguanosine
  modified_base 11: mod_base = OTHER; note = 2'-fluorouridine
  modified_base 12: mod_base = um
  modified_base 13: mod_base = um
  modified_base 14: mod_base = cm
  modified_base 15: mod_base = OTHER; note = 2'-O-methyladenosine
  modified_base 16: mod_base = gm
  modified_base 17: mod_base = cm
  modified_base 18: mod_base = um
  modified_base 19: mod_base = um
  modified_base 20: mod_base = OTHER; note = 2'-O-methyladenosine
  modified_base 21: mod_base = um
  source 1..21: mol_type = other RNA
agctttctcgtttcagcttat

SEQ ID NO: 1382 - RNA, 21 nt, synthetic construct
  modified_base 1: mod_base = gm
  modified_base 1^2: mod_base = OTHER; note = phosphorothioate linkage
  modified_base 2: mod_base = cm
  modified_base 3: mod_base = um
  modified_base 4: mod_base = um
  modified_base 5: mod_base = gm
  modified_base 6: mod_base = OTHER; note = 2'-O-methyladenosine
  modified_base 7: mod_base = OTHER; note = 2'-O-methyladenosine
  modified_base 8: mod_base = um
  modified_base 9: mod_base = OTHER; note = 2'-fluoroguanosine
  modified_base 10: mod_base = OTHER; note = 2'-fluoroguanosine
  modified_base 11: mod_base = OTHER; note = 2'-fluoroadenosine
  modified_base 12: mod_base = OTHER; note = 2'-O-methyladenosine
  modified_base 13: mod_base = um
  modified_base 14: mod_base = gm
  modified_base 15: mod_base = gm
  modified_base 16: mod_base = um
  modified_base 17: mod_base = OTHER; note = 2'-O-methyladenosine
  modified_base 18: mod_base = OTHER; note = 2'-O-methyladenosine
  modified_base 19: mod_base = cm
  modified_base 20: mod_base = OTHER; note = 2'-O-methyladenosine
  modified_base 21: mod_base = OTHER; note = 2'-O-methyladenosine
  source 1..21: mol_type = other RNA
gcttgaatggaatggtaacaa

SEQ ID NO: 1383 - RNA, 21 nt, synthetic construct
  modified_base 1: mod_base = gm
  modified_base 1^2: mod_base = OTHER; note = phosphorothioate linkage
  modified_base 2: mod_base = cm
  modified_base 3: mod_base = gm
  modified_base 4: mod_base = OTHER; note = 2'-O-methyladenosine
  modified_base 5: mod_base = cm
  modified_base 6: mod_base = OTHER; note = 2'-O-methyladenosine
  modified_base 7: mod_base = gm
  modified_base 8: mod_base = OTHER; note = 2'-O-methyladenosine
  modified_base 9: mod_base = OTHER; note = 2'-fluoroguanosine
  modified_base 10: mod_base = OTHER; note = 2'-fluoroadenosine
  modified_base 11: mod_base = OTHER; note = 2'-fluoroadenosine
  modified_base 12: mod_base = um
  modified_base 13: mod_base = OTHER; note = 2'-O-methyladenosine
  modified_base 14: mod_base = gm
  modified_base 15: mod_base = um
  modified_base 16: mod_base = um
  modified_base 17: mod_base = um
  modified_base 18: mod_base = cm
  modified_base 19: mod_base = gm
  modified_base 20: mod_base = OTHER; note = 2'-O-methyladenosine
  modified_base 21: mod_base = OTHER; note = 2'-O-methyladenosine
  source 1..21: mol_type = other RNA
gcgacagagaatagtttcgaa

SEQ ID NO: 1384 - RNA, 21 nt, synthetic construct
  modified_base 1: mod_base = gm
  modified_base 1^2: mod_base = OTHER; note = phosphorothioate linkage
  modified_base 2: mod_base = OTHER; note = 2'-O-methyladenosine
  modified_base 3: mod_base = um
  modified_base 4: mod_base = gm
  modified_base 5: mod_base = OTHER; note = 2'-O-methyladenosine
  modified_base 6: mod_base = gm
  modified_base 7: mod_base = gm
  modified_base 8: mod_base = OTHER; note = 2'-O-methyladenosine
  modified_base 9: mod_base = OTHER; note = 2'-fluorouridine
  modified_base 10: mod_base = OTHER; note = 2'-fluoroguanosine
  modified_base 11: mod_base = OTHER; note = 2'-fluorouridine
  modified_base 12: mod_base = cm
  modified_base 13: mod_base = OTHER; note = 2'-O-methyladenosine
  modified_base 14: mod_base = OTHER; note = 2'-O-methyladenosine
  modified_base 15: mod_base = OTHER; note = 2'-O-methyladenosine
  modified_base 16: mod_base = OTHER; note = 2'-O-methyladenosine
  modified_base 17: mod_base = OTHER; note = 2'-O-methyladenosine
  modified_base 18: mod_base = um
  modified_base 19: mod_base = gm
  modified_base 20: mod_base = cm
  modified_base 21: mod_base = OTHER; note = 2'-O-methyladenosine
  source 1..21: mol_type = other RNA
gatgaggatgtcaaaaatgca

SEQ ID NO: 1385 - RNA, 21 nt, synthetic construct
  modified_base 1: mod_base = gm
  modified_base 1^2: mod_base = OTHER; note = phosphorothioate linkage
  modified_base 2: mod_base = OTHER; note = 2'-O-methyladenosine
  modified_base 3: mod_base = um
  modified_base 4: mod_base = gm
  modified_base 5: mod_base = OTHER; note = 2'-O-methyladenosine
  modified_base 6: mod_base = gm
  modified_base 7: mod_base = gm
  modified_base 8: mod_base = OTHER; note = 2'-O-methyladenosine
  modified_base 9: mod_base = OTHER; note = 2'-fluorouridine
  modified_base 10: mod_base = gm
  modified_base 11: mod_base = OTHER; note = 2'-fluorouridine
  modified_base 12: mod_base = cm
  modified_base 13: mod_base = OTHER; note = 2'-fluoroadenosine
  modified_base 14: mod_base = OTHER; note = 2'-O-methyladenosine
  modified_base 15: mod_base = OTHER; note = 2'-O-methyladenosine
  modified_base 16: mod_base = OTHER; note = 2'-O-methyladenosine
  modified_base 17: mod_base = OTHER; note = 2'-O-methyladenosine
  modified_base 18: mod_base = um
  modified_base 19: mod_base = gm
  modified_base 20: mod_base = cm
  modified_base 21: mod_base = OTHER; note = 2'-O-methyladenosine
  source 1..21: mol_type = other RNA
gatgaggatgtcaaaaatgca

SEQ ID NO: 1386 - RNA, 21 nt, synthetic construct
  modified_base 1: mod_base = gm
  modified_base 1^2: mod_base = OTHER; note = phosphorothioate linkage
  modified_base 2: mod_base = um
  modified_base 3: mod_base = gm
  modified_base 4: mod_base = OTHER; note = 2'-O-methyladenosine
  modified_base 5: mod_base = um
  modified_base 6: mod_base = gm
  modified_base 7: mod_base = cm
  modified_base 8: mod_base = cm
  modified_base 9: mod_base = OTHER; note = 2'-fluorocytidine
  modified_base 10: mod_base = OTHER; note = 2'-fluorocytidine
  modified_base 11: mod_base = OTHER; note = 2'-fluoroadenosine
  modified_base 12: mod_base = um
  modified_base 13: mod_base = um
  modified_base 14: mod_base = cm
  modified_base 15: mod_base = cm
  modified_base 16: mod_base = um
  modified_base 17: mod_base = um
  modified_base 18: mod_base = gm
  modified_base 19: mod_base = OTHER; note = 2'-O-methyladenosine
  modified_base 20: mod_base = um
  modified_base 21: mod_base = OTHER; note = 2'-O-methyladenosine
  source 1..21: mol_type = other RNA
gtgatgccccattccttgata

SEQ ID NO: 1387 - RNA, 21 nt, synthetic construct
  modified_base 1: mod_base = um
  modified_base 1^2: mod_base = OTHER; note = phosphorothioate linkage
  modified_base 2: mod_base = gm
  modified_base 3: mod_base = OTHER; note = 2'-O-methyladenosine
  modified_base 4: mod_base = um
  modified_base 5: mod_base = gm
  modified_base 6: mod_base = cm
  modified_base 7: mod_base = cm
  modified_base 8: mod_base = cm
  modified_base 9: mod_base = OTHER; note = 2'-fluorocytidine
  modified_base 10: mod_base = OTHER; note = 2'-fluoroadenosine
  modified_base 11: mod_base = OTHER; note = 2'-fluorouridine
  modified_base 12: mod_base = um
  modified_base 13: mod_base = cm
  modified_base 14: mod_base = cm
  modified_base 15: mod_base = um
  modified_base 16: mod_base = um
  modified_base 17: mod_base = gm
  modified_base 18: mod_base = OTHER; note = 2'-O-methyladenosine
  modified_base 19: mod_base = um
  modified_base 20: mod_base = cm
  modified_base 21: mod_base = OTHER; note = 2'-O-methyladenosine
  source 1..21: mol_type = other RNA
tgatgccccattccttgatca

SEQ ID NO: 1388 - RNA, 21 nt, synthetic construct
  modified_base 1: mod_base = gm
  modified_base 1^2: mod_base = OTHER; note = phosphorothioate linkage
  modified_base 2: mod_base = OTHER; note = 2'-O-methyladenosine
  modified_base 3: mod_base = um
  modified_base 4: mod_base = gm
  modified_base 5: mod_base = cm
  modified_base 6: mod_base = cm
  modified_base 7: mod_base = cm
  modified_base 8: mod_base = cm
  modified_base 9: mod_base = OTHER; note = 2'-fluoroadenosine
  modified_base 10: mod_base = OTHER; note = 2'-fluorouridine
  modified_base 11: mod_base = OTHER; note = 2'-fluorouridine
  modified_base 12: mod_base = cm
  modified_base 13: mod_base = cm
  modified_base 14: mod_base = um
  modified_base 15: mod_base = um
  modified_base 16: mod_base = OTHER; note = 2 -O-methylinosine
  modified_base 17: mod_base = OTHER; note = 2'-O-methyladenosine
  modified_base 18: mod_base = um
  modified_base 19: mod_base = cm
  modified_base 20: mod_base = gm
  modified_base 21: mod_base = OTHER; note = 2'-O-methyladenosine
  source 1..21: mol_type = other RNA
gatgccccattccttnatcga

SEQ ID NO: 1389 - RNA, 21 nt, synthetic construct
  modified_base 1: mod_base = cm
  modified_base 1^2: mod_base = OTHER; note = phosphorothioate linkage
  modified_base 2: mod_base = um
  modified_base 3: mod_base = cm
  modified_base 4: mod_base = OTHER; note = 2'-O-methyladenosine
  modified_base 5: mod_base = um
  modified_base 6: mod_base = cm
  modified_base 7: mod_base = gm
  modified_base 8: mod_base = gm
  modified_base 9: mod_base = OTHER; note = 2'-fluoroadenosine
  modified_base 10: mod_base = OTHER; note = 2'-fluoroguanosine
  modified_base 11: mod_base = OTHER; note = 2'-fluoroguanosine
  modified_base 12: mod_base = OTHER; note = 2'-O-methyladenosine
  modified_base 13: mod_base = cm
  modified_base 14: mod_base = um
  modified_base 15: mod_base = um
  modified_base 16: mod_base = gm
  modified_base 17: mod_base = OTHER; note = 2'-O-methyladenosine
  modified_base 18: mod_base = OTHER; note = 2'-O-methyladenosine
  modified_base 19: mod_base = um
  modified_base 20: mod_base = gm
  modified_base 21: mod_base = OTHER; note = 2'-O-methyladenosine
  source 1..21: mol_type = other RNA
ctcatcggaggacttgaatga

SEQ ID NO: 1390 - RNA, 21 nt, synthetic construct
  modified_base 1: mod_base = um
  modified_base 1^2: mod_base = OTHER; note = phosphorothioate linkage
  modified_base 2: mod_base = cm
  modified_base 3: mod_base = OTHER; note = 2'-O-methyladenosine
  modified_base 4: mod_base = um
  modified_base 5: mod_base = cm
  modified_base 6: mod_base = gm
  modified_base 7: mod_base = gm
  modified_base 8: mod_base = OTHER; note = 2'-O-methyladenosine
  modified_base 9: mod_base = OTHER; note = 2'-fluoroguanosine
  modified_base 10: mod_base = OTHER; note = 2'-fluoroguanosine
  modified_base 11: mod_base = OTHER; note = 2'-fluoroadenosine
  modified_base 12: mod_base = cm
  modified_base 13: mod_base = um
  modified_base 14: mod_base = um
  modified_base 15: mod_base = gm
  modified_base 16: mod_base = OTHER; note = 2'-O-methyladenosine
  modified_base 17: mod_base = OTHER; note = 2'-O-methyladenosine
  modified_base 18: mod_base = um
  modified_base 19: mod_base = OTHER; note = 2 -O-methylinosine
  modified_base 20: mod_base = gm
  modified_base 21: mod_base = OTHER; note = 2'-O-methyladenosine
  source 1..21: mol_type = other RNA
tcatcggaggacttgaatnga

SEQ ID NO: 1391 - RNA, 21 nt, synthetic construct
  modified_base 1: mod_base = cm
  modified_base 1^2: mod_base = OTHER; note = phosphorothioate linkage
  modified_base 2: mod_base = OTHER; note = 2'-O-methyladenosine
  modified_base 3: mod_base = um
  modified_base 4: mod_base = cm
  modified_base 5: mod_base = gm
  modified_base 6: mod_base = gm
  modified_base 7: mod_base = OTHER; note = 2'-O-methyladenosine
  modified_base 8: mod_base = gm
  modified_base 9: mod_base = OTHER; note = 2'-fluoroguanosine
  modified_base 10: mod_base = OTHER; note = 2'-fluoroadenosine
  modified_base 11: mod_base = OTHER; note = 2'-fluorocytidine
  modified_base 12: mod_base = um
  modified_base 13: mod_base = um
  modified_base 14: mod_base = gm
  modified_base 15: mod_base = OTHER; note = 2'-O-methyladenosine
  modified_base 16: mod_base = OTHER; note = 2'-O-methyladenosine
  modified_base 17: mod_base = um
  modified_base 18: mod_base = gm
  modified_base 19: mod_base = gm
  modified_base 20: mod_base = OTHER; note = 2'-O-methyladenosine
  modified_base 21: mod_base = OTHER; note = 2'-O-methyladenosine
  source 1..21: mol_type = other RNA
catcggaggacttgaatggaa

SEQ ID NO: 1392 - RNA, 21 nt, synthetic construct
  modified_base 1: mod_base = um
  modified_base 1^2: mod_base = OTHER; note = phosphorothioate linkage
  modified_base 2: mod_base = cm
  modified_base 3: mod_base = gm
  modified_base 4: mod_base = gm
  modified_base 5: mod_base = OTHER; note = 2'-O-methyladenosine
  modified_base 6: mod_base = gm
  modified_base 7: mod_base = gm
  modified_base 8: mod_base = OTHER; note = 2'-O-methyladenosine
  modified_base 9: mod_base = OTHER; note = 2'-fluorocytidine
  modified_base 10: mod_base = OTHER; note = 2'-fluorouridine
  modified_base 11: mod_base = OTHER; note = 2'-fluorouridine
  modified_base 12: mod_base = gm
  modified_base 13: mod_base = OTHER; note = 2'-O-methyladenosine
  modified_base 14: mod_base = OTHER; note = 2'-O-methyladenosine
  modified_base 15: mod_base = um
  modified_base 16: mod_base = gm
  modified_base 17: mod_base = gm
  modified_base 18: mod_base = OTHER; note = 2'-O-methyladenosine
  modified_base 19: mod_base = OTHER; note = 2'-O-methyladenosine
  modified_base 20: mod_base = um
  modified_base 21: mod_base = OTHER; note = 2'-O-methyladenosine
  source 1..21: mol_type = other RNA
tcggaggacttgaatggaata

SEQ ID NO: 1393 - RNA, 21 nt, synthetic construct
  modified_base 1: mod_base = cm
  modified_base 1^2: mod_base = OTHER; note = phosphorothioate linkage
  modified_base 2: mod_base = gm
  modified_base 3: mod_base = gm
  modified_base 4: mod_base = OTHER; note = 2'-O-methyladenosine
  modified_base 5: mod_base = gm
  modified_base 6: mod_base = gm
  modified_base 7: mod_base = OTHER; note = 2'-O-methyladenosine
  modified_base 8: mod_base = cm
  modified_base 9: mod_base = OTHER; note = 2'-fluorouridine
  modified_base 10: mod_base = OTHER; note = 2'-fluorouridine
  modified_base 11: mod_base = OTHER; note = 2'-fluoroguanosine
  modified_base 12: mod_base = OTHER; note = 2'-O-methyladenosine
  modified_base 13: mod_base = OTHER; note = 2'-O-methyladenosine
  modified_base 14: mod_base = um
  modified_base 15: mod_base = gm
  modified_base 16: mod_base = OTHER; note = 2 -O-methylinosine
  modified_base 17: mod_base = OTHER; note = 2'-O-methyladenosine
  modified_base 18: mod_base = OTHER; note = 2'-O-methyladenosine
  modified_base 19: mod_base = um
  modified_base 20: mod_base = gm
  modified_base 21: mod_base = OTHER; note = 2'-O-methyladenosine
  source 1..21: mol_type = other RNA
cggaggacttgaatgnaatga

SEQ ID NO: 1394 - RNA, 21 nt, synthetic construct
  modified_base 1: mod_base = OTHER; note = 2'-O-methyladenosine
  modified_base 1^2: mod_base = OTHER; note = phosphorothioate linkage
  modified_base 2: mod_base = cm
  modified_base 3: mod_base = um
  modified_base 4: mod_base = gm
  modified_base 5: mod_base = OTHER; note = 2'-O-methyladenosine
  modified_base 6: mod_base = OTHER; note = 2'-O-methyladenosine
  modified_base 7: mod_base = OTHER; note = 2'-O-methyladenosine
  modified_base 8: mod_base = gm
  modified_base 9: mod_base = OTHER; note = 2'-fluorocytidine
  modified_base 10: mod_base = OTHER; note = 2'-fluoroguanosine
  modified_base 11: mod_base = OTHER; note = 2'-fluoroadenosine
  modified_base 12: mod_base = OTHER; note = 2'-O-methyladenosine
  modified_base 13: mod_base = cm
  modified_base 14: mod_base = um
  modified_base 15: mod_base = um
  modified_base 16: mod_base = cm
  modified_base 17: mod_base = OTHER; note = 2'-O-methyladenosine
  modified_base 18: mod_base = OTHER; note = 2 -O-methylinosine
  modified_base 19: mod_base = um
  modified_base 20: mod_base = gm
  modified_base 21: mod_base = um
  source 1..21: mol_type = other RNA
actgaaagcgaacttcantgt

SEQ ID NO: 1395 - RNA, 21 nt, synthetic construct
  modified_base 1: mod_base = cm
  modified_base 1^2: mod_base = OTHER; note = phosphorothioate linkage
  modified_base 2: mod_base = um
  modified_base 3: mod_base = um
  modified_base 4: mod_base = cm
  modified_base 5: mod_base = um
  modified_base 6: mod_base = cm
  modified_base 7: mod_base = um
  modified_base 8: mod_base = um
  modified_base 9: mod_base = OTHER; note = 2'-fluorocytidine
  modified_base 10: mod_base = OTHER; note = 2'-fluorocytidine
  modified_base 11: mod_base = OTHER; note = 2'-fluoroadenosine
  modified_base 12: mod_base = gm
  modified_base 13: mod_base = gm
  modified_base 14: mod_base = OTHER; note = 2'-O-methyladenosine
  modified_base 15: mod_base = cm
  modified_base 16: mod_base = OTHER; note = 2'-O-methyladenosine
  modified_base 17: mod_base = um
  modified_base 18: mod_base = OTHER; note = 2'-O-methyladenosine
  modified_base 19: mod_base = cm
  modified_base 20: mod_base = um
  modified_base 21: mod_base = um
  source 1..21: mol_type = other RNA
cttctcttccaggacatactt

SEQ ID NO: 1396 - RNA, 21 nt, synthetic construct
  modified_base 1: mod_base = gm
  modified_base 1^2: mod_base = OTHER; note = phosphorothioate linkage
  modified_base 2: mod_base = OTHER; note = 2'-O-methyladenosine
  modified_base 3: mod_base = um
  modified_base 4: mod_base = gm
  modified_base 5: mod_base = um
  modified_base 6: mod_base = cm
  modified_base 7: mod_base = OTHER; note = 2'-O-methyladenosine
  modified_base 8: mod_base = OTHER; note = 2'-O-methyladenosine
  modified_base 9: mod_base = OTHER; note = 2'-fluoroadenosine
  modified_base 10: mod_base = OTHER; note = 2'-fluoroadenosine
  modified_base 11: mod_base = OTHER; note = 2'-fluoroadenosine
  modified_base 12: mod_base = um
  modified_base 13: mod_base = gm
  modified_base 14: mod_base = cm
  modified_base 15: mod_base = OTHER; note = 2'-O-methyladenosine
  modified_base 16: mod_base = OTHER; note = 2 -O-methylinosine
  modified_base 17: mod_base = um
  modified_base 18: mod_base = um
  modified_base 19: mod_base = gm
  modified_base 20: mod_base = gm
  modified_base 21: mod_base = OTHER; note = 2'-O-methyladenosine
  source 1..21: mol_type = other RNA
gatgtcaaaaatgcanttgga

SEQ ID NO: 1397 - RNA, 21 nt, synthetic construct
  modified_base 1: mod_base = gm
  modified_base 1^2: mod_base = OTHER; note = phosphorothioate linkage
  modified_base 2: mod_base = um
  modified_base 3: mod_base = gm
  modified_base 4: mod_base = OTHER; note = 2'-O-methyladenosine
  modified_base 5: mod_base = um
  modified_base 6: mod_base = gm
  modified_base 7: mod_base = OTHER; note = 2'-O-methyladenosine
  modified_base 8: mod_base = gm
  modified_base 9: mod_base = OTHER; note = 2'-fluoroadenosine
  modified_base 10: mod_base = OTHER; note = 2'-fluoroadenosine
  modified_base 11: mod_base = OTHER; note = 2'-fluorouridine
  modified_base 12: mod_base = gm
  modified_base 13: mod_base = gm
  modified_base 14: mod_base = gm
  modified_base 15: mod_base = OTHER; note = 2'-O-methyladenosine
  modified_base 16: mod_base = OTHER; note = 2 -O-methylinosine
  modified_base 17: mod_base = OTHER; note = 2'-O-methyladenosine
  modified_base 18: mod_base = cm
  modified_base 19: mod_base = cm
  modified_base 20: mod_base = um
  modified_base 21: mod_base = um
  source 1..21: mol_type = other RNA
gtgatgagaatggganacctt

SEQ ID NO: 1398 - RNA, 21 nt, synthetic construct
  modified_base 1: mod_base = gm
  modified_base 1^2: mod_base = OTHER; note = phosphorothioate linkage
  modified_base 2: mod_base = OTHER; note = 2'-O-methyladenosine
  modified_base 3: mod_base = um
  modified_base 4: mod_base = cm
  modified_base 5: mod_base = um
  modified_base 6: mod_base = um
  modified_base 7: mod_base = gm
  modified_base 8: mod_base = OTHER; note = 2'-O-methyladenosine
  modified_base 9: mod_base = OTHER; note = 2'-fluoroadenosine
  modified_base 10: mod_base = OTHER; note = 2'-fluoroadenosine
  modified_base 11: mod_base = OTHER; note = 2'-fluoroguanosine
  modified_base 12: mod_base = OTHER; note = 2'-O-methyladenosine
  modified_base 13: mod_base = gm
  modified_base 14: mod_base = gm
  modified_base 15: mod_base = OTHER; note = 2'-O-methyladenosine
  modified_base 16: mod_base = OTHER; note = 2'-O-methyladenosine
  modified_base 17: mod_base = um
  modified_base 18: mod_base = cm
  modified_base 19: mod_base = cm
  modified_base 20: mod_base = OTHER; note = 2'-O-methyladenosine
  modified_base 21: mod_base = OTHER; note = 2'-O-methyladenosine
  source 1..21: mol_type = other RNA
gatcttgaaagaggaatccaa

SEQ ID NO: 1399 - RNA, 21 nt, synthetic construct
  modified_base 1: mod_base = OTHER; note = 2'-O-methyladenosine
  modified_base 1^2: mod_base = OTHER; note = phosphorothioate linkage
  modified_base 2: mod_base = cm
  modified_base 3: mod_base = gm
  modified_base 4: mod_base = OTHER; note = 2'-O-methyladenosine
  modified_base 5: mod_base = gm
  modified_base 6: mod_base = OTHER; note = 2'-O-methyladenosine
  modified_base 7: mod_base = cm
  modified_base 8: mod_base = um
  modified_base 9: mod_base = OTHER; note = 2'-fluoroguanosine
  modified_base 10: mod_base = OTHER; note = 2'-fluoroguanosine
  modified_base 11: mod_base = OTHER; note = 2'-fluorouridine
  modified_base 12: mod_base = um
  modified_base 13: mod_base = cm
  modified_base 14: mod_base = OTHER; note = 2'-O-methyladenosine
  modified_base 15: mod_base = um
  modified_base 16: mod_base = OTHER; note = 2 -O-methylinosine
  modified_base 17: mod_base = cm
  modified_base 18: mod_base = um
  modified_base 19: mod_base = cm
  modified_base 20: mod_base = OTHER; note = 2'-O-methyladenosine
  modified_base 21: mod_base = um
  source 1..21: mol_type = other RNA
acgagactggttcatnctcat

SEQ ID NO: 1400 - RNA, 21 nt, synthetic construct
  modified_base 1: mod_base = gm
  modified_base 1^2: mod_base = OTHER; note = phosphorothioate linkage
  modified_base 2: mod_base = cm
  modified_base 3: mod_base = gm
  modified_base 4: mod_base = OTHER; note = 2'-O-methyladenosine
  modified_base 5: mod_base = OTHER; note = 2'-O-methyladenosine
  modified_base 6: mod_base = cm
  modified_base 7: mod_base = um
  modified_base 8: mod_base = um
  modified_base 9: mod_base = OTHER; note = 2'-fluorocytidine
  modified_base 10: mod_base = OTHER; note = 2'-fluoroadenosine
  modified_base 11: mod_base = OTHER; note = 2'-fluoroguanosine
  modified_base 12: mod_base = um
  modified_base 13: mod_base = gm
  modified_base 14: mod_base = um
  modified_base 15: mod_base = OTHER; note = 2'-O-methyladenosine
  modified_base 16: mod_base = OTHER; note = 2'-O-methyladenosine
  modified_base 17: mod_base = um
  modified_base 18: mod_base = cm
  modified_base 19: mod_base = um
  modified_base 20: mod_base = um
  modified_base 21: mod_base = um
  source 1..21: mol_type = other RNA
gcgaacttcagtgtaatcttt

SEQ ID NO: 1401 - RNA, 21 nt, synthetic construct
  modified_base 1: mod_base = OTHER; note = 2'-O-methyladenosine
  modified_base 1^2: mod_base = OTHER; note = phosphorothioate linkage
  modified_base 2: mod_base = cm
  modified_base 3: mod_base = cm
  modified_base 4: mod_base = gm
  modified_base 5: mod_base = OTHER; note = 2'-O-methyladenosine
  modified_base 6: mod_base = um
  modified_base 7: mod_base = um
  modified_base 8: mod_base = OTHER; note = 2'-O-methyladenosine
  modified_base 9: mod_base = OTHER; note = 2'-fluoroguanosine
  modified_base 10: mod_base = OTHER; note = 2'-fluoroadenosine
  modified_base 11: mod_base = OTHER; note = 2'-fluoroguanosine
  modified_base 12: mod_base = OTHER; note = 2'-O-methyladenosine
  modified_base 13: mod_base = cm
  modified_base 14: mod_base = cm
  modified_base 15: mod_base = um
  modified_base 16: mod_base = um
  modified_base 17: mod_base = gm
  modified_base 18: mod_base = OTHER; note = 2'-O-methyladenosine
  modified_base 19: mod_base = um
  modified_base 20: mod_base = OTHER; note = 2'-O-methyladenosine
  modified_base 21: mod_base = OTHER; note = 2'-O-methyladenosine
  source 1..21: mol_type = other RNA
accgattagagaccttgataa

SEQ ID NO: 1402 - RNA, 21 nt, synthetic construct
  modified_base 1: mod_base = gm
  modified_base 1^2: mod_base = OTHER; note = phosphorothioate linkage
  modified_base 2: mod_base = um
  modified_base 3: mod_base = OTHER; note = 2'-O-methyladenosine
  modified_base 4: mod_base = cm
  modified_base 5: mod_base = um
  modified_base 6: mod_base = OTHER; note = 2'-O-methyladenosine
  modified_base 7: mod_base = cm
  modified_base 8: mod_base = um
  modified_base 9: mod_base = OTHER; note = 2'-fluoroadenosine
  modified_base 10: mod_base = OTHER; note = 2'-fluoroadenosine
  modified_base 11: mod_base = OTHER; note = 2'-fluoroguanosine
  modified_base 12: mod_base = gm
  modified_base 13: mod_base = gm
  modified_base 14: mod_base = cm
  modified_base 15: mod_base = um
  modified_base 16: mod_base = um
  modified_base 17: mod_base = um
  modified_base 18: mod_base = cm
  modified_base 19: mod_base = OTHER; note = 2'-O-methyladenosine
  modified_base 20: mod_base = cm
  modified_base 21: mod_base = um
  source 1..21: mol_type = other RNA
gtactactaagggctttcact

SEQ ID NO: 1403 - RNA, 21 nt, synthetic construct
  modified_base 1: mod_base = gm
  modified_base 1^2: mod_base = OTHER; note = phosphorothioate linkage
  modified_base 2: mod_base = OTHER; note = 2'-O-methyladenosine
  modified_base 3: mod_base = OTHER; note = 2'-O-methyladenosine
  modified_base 4: mod_base = um
  modified_base 5: mod_base = gm
  modified_base 6: mod_base = gm
  modified_base 7: mod_base = um
  modified_base 8: mod_base = OTHER; note = 2'-O-methyladenosine
  modified_base 9: mod_base = OTHER; note = 2'-fluoroadenosine
  modified_base 10: mod_base = OTHER; note = 2'-fluorocytidine
  modified_base 11: mod_base = OTHER; note = 2'-fluoroadenosine
  modified_base 12: mod_base = cm
  modified_base 13: mod_base = gm
  modified_base 14: mod_base = gm
  modified_base 15: mod_base = um
  modified_base 16: mod_base = um
  modified_base 17: mod_base = cm
  modified_base 18: mod_base = OTHER; note = 2 -O-methylinosine
  modified_base 19: mod_base = OTHER; note = 2'-O-methyladenosine
  modified_base 20: mod_base = gm
  modified_base 21: mod_base = um
  source 1..21: mol_type = other RNA
gaatggtaacacggttcnagt

SEQ ID NO: 1404 - RNA, 21 nt, synthetic construct
  modified_base 1: mod_base = um
  modified_base 1^2: mod_base = OTHER; note = phosphorothioate linkage
  modified_base 2: mod_base = gm
  modified_base 3: mod_base = gm
  modified_base 4: mod_base = um
  modified_base 5: mod_base = OTHER; note = 2'-O-methyladenosine
  modified_base 6: mod_base = OTHER; note = 2'-O-methyladenosine
  modified_base 7: mod_base = cm
  modified_base 8: mod_base = OTHER; note = 2'-O-methyladenosine
  modified_base 9: mod_base = OTHER; note = 2'-fluorocytidine
  modified_base 10: mod_base = OTHER; note = 2'-fluoroguanosine
  modified_base 11: mod_base = OTHER; note = 2'-fluoroguanosine
  modified_base 12: mod_base = um
  modified_base 13: mod_base = um
  modified_base 14: mod_base = cm
  modified_base 15: mod_base = gm
  modified_base 16: mod_base = OTHER; note = 2'-O-methyladenosine
  modified_base 17: mod_base = OTHER; note = 2 -O-methylinosine
  modified_base 18: mod_base = um
  modified_base 19: mod_base = cm
  modified_base 20: mod_base = um
  modified_base 21: mod_base = OTHER; note = 2'-O-methyladenosine
  source 1..21: mol_type = other RNA
tggtaacacggttcgantcta

SEQ ID NO: 1405 - RNA, 21 nt, synthetic construct
  modified_base 1: mod_base = gm
  modified_base 1^2: mod_base = OTHER; note = phosphorothioate linkage
  modified_base 2: mod_base = um
  modified_base 3: mod_base = um
  modified_base 4: mod_base = OTHER; note = 2'-O-methyladenosine
  modified_base 5: mod_base = um
  modified_base 6: mod_base = gm
  modified_base 7: mod_base = cm
  modified_base 8: mod_base = OTHER; note = 2'-O-methyladenosine
  modified_base 9: mod_base = OTHER; note = 2'-fluoroadenosine
  modified_base 10: mod_base = OTHER; note = 2'-fluoroguanosine
  modified_base 11: mod_base = OTHER; note = 2'-fluorocytidine
  modified_base 12: mod_base = cm
  modified_base 13: mod_base = um
  modified_base 14: mod_base = um
  modified_base 15: mod_base = OTHER; note = 2'-O-methyladenosine
  modified_base 16: mod_base = cm
  modified_base 17: mod_base = OTHER; note = 2'-O-methyladenosine
  modified_base 18: mod_base = OTHER; note = 2'-O-methyladenosine
  modified_base 19: mod_base = cm
  modified_base 20: mod_base = um
  modified_base 21: mod_base = OTHER; note = 2'-O-methyladenosine
  source 1..21: mol_type = other RNA
gttatgcaagccttacaacta

SEQ ID NO: 1406 - RNA, 21 nt, synthetic construct
  modified_base 1: mod_base = gm
  modified_base 1^2: mod_base = OTHER; note = phosphorothioate linkage
  modified_base 2: mod_base = gm
  modified_base 3: mod_base = OTHER; note = 2'-O-methyladenosine
  modified_base 4: mod_base = gm
  modified_base 5: mod_base = OTHER; note = 2'-O-methyladenosine
  modified_base 6: mod_base = um
  modified_base 7: mod_base = OTHER; note = 2'-O-methyladenosine
  modified_base 8: mod_base = OTHER; note = 2'-O-methyladenosine
  modified_base 9: mod_base = OTHER; note = 2'-fluoroguanosine
  modified_base 10: mod_base = OTHER; note = 2'-fluoroadenosine
  modified_base 11: mod_base = OTHER; note = 2'-fluoroguanosine
  modified_base 12: mod_base = cm
  modified_base 13: mod_base = um
  modified_base 14: mod_base = um
  modified_base 15: mod_base = um
  modified_base 16: mod_base = cm
  modified_base 17: mod_base = um
  modified_base 18: mod_base = cm
  modified_base 19: mod_base = OTHER; note = 2 -O-methylinosine
  modified_base 20: mod_base = um
  modified_base 21: mod_base = um
  source 1..21: mol_type = other RNA
ggagataagagctttctcntt

SEQ ID NO: 1407 - RNA, 21 nt, synthetic construct
  modified_base 1: mod_base = um
  modified_base 1^2: mod_base = OTHER; note = phosphorothioate linkage
  modified_base 2: mod_base = cm
  modified_base 3: mod_base = OTHER; note = 2'-O-methyladenosine
  modified_base 4: mod_base = um
  modified_base 5: mod_base = gm
  modified_base 6: mod_base = cm
  modified_base 7: mod_base = cm
  modified_base 8: mod_base = um
  modified_base 9: mod_base = OTHER; note = 2'-fluorouridine
  modified_base 10: mod_base = OTHER; note = 2'-fluoroguanosine
  modified_base 11: mod_base = OTHER; note = 2'-fluoroadenosine
  modified_base 12: mod_base = OTHER; note = 2'-O-methyladenosine
  modified_base 13: mod_base = OTHER; note = 2'-O-methyladenosine
  modified_base 14: mod_base = cm
  modified_base 15: mod_base = OTHER; note = 2'-O-methyladenosine
  modified_base 16: mod_base = OTHER; note = 2'-O-methyladenosine
  modified_base 17: mod_base = um
  modified_base 18: mod_base = gm
  modified_base 19: mod_base = gm
  modified_base 20: mod_base = OTHER; note = 2'-O-methyladenosine
  modified_base 21: mod_base = OTHER; note = 2'-O-methyladenosine
  source 1..21: mol_type = other RNA
tcatgccttgaaacaatggaa

SEQ ID NO: 1408 - RNA, 21 nt, synthetic construct
  modified_base 1: mod_base = um
  modified_base 1^2: mod_base = OTHER; note = phosphorothioate linkage
  modified_base 2: mod_base = gm
  modified_base 3: mod_base = cm
  modified_base 4: mod_base = gm
  modified_base 5: mod_base = OTHER; note = 2'-O-methyladenosine
  modified_base 6: mod_base = OTHER; note = 2'-O-methyladenosine
  modified_base 7: mod_base = OTHER; note = 2'-O-methyladenosine
  modified_base 8: mod_base = OTHER; note = 2'-O-methyladenosine
  modified_base 9: mod_base = OTHER; note = 2'-fluoroguanosine
  modified_base 10: mod_base = OTHER; note = 2'-fluorocytidine
  modified_base 11: mod_base = OTHER; note = 2'-fluorouridine
  modified_base 12: mod_base = um
  modified_base 13: mod_base = gm
  modified_base 14: mod_base = OTHER; note = 2'-O-methyladenosine
  modified_base 15: mod_base = OTHER; note = 2'-O-methyladenosine
  modified_base 16: mod_base = cm
  modified_base 17: mod_base = OTHER; note = 2'-O-methyladenosine
  modified_base 18: mod_base = OTHER; note = 2 -O-methylinosine
  modified_base 19: mod_base = um
  modified_base 20: mod_base = cm
  modified_base 21: mod_base = um
  source 1..21: mol_type = other RNA
tgcgaaaagcttgaacantct

SEQ ID NO: 1409 - RNA, 21 nt, synthetic construct
  modified_base 1: mod_base = gm
  modified_base 1^2: mod_base = OTHER; note = phosphorothioate linkage
  modified_base 2: mod_base = um
  modified_base 3: mod_base = gm
  modified_base 4: mod_base = cm
  modified_base 5: mod_base = OTHER; note = 2'-O-methyladenosine
  modified_base 6: mod_base = gm
  modified_base 7: mod_base = OTHER; note = 2'-O-methyladenosine
  modified_base 8: mod_base = um
  modified_base 9: mod_base = OTHER; note = 2'-fluorouridine
  modified_base 10: mod_base = OTHER; note = 2'-fluoroadenosine
  modified_base 11: mod_base = OTHER; note = 2'-fluoroguanosine
  modified_base 12: mod_base = OTHER; note = 2'-O-methyladenosine
  modified_base 13: mod_base = gm
  modified_base 14: mod_base = gm
  modified_base 15: mod_base = um
  modified_base 16: mod_base = um
  modified_base 17: mod_base = um
  modified_base 18: mod_base = cm
  modified_base 19: mod_base = gm
  modified_base 20: mod_base = um
  modified_base 21: mod_base = OTHER; note = 2'-O-methyladenosine
  source 1..21: mol_type = other RNA
gtgcagattagaggtttcgta

SEQ ID NO: 1410 - RNA, 21 nt, synthetic construct
  modified_base 1: mod_base = OTHER; note = 2'-O-methyladenosine
  modified_base 1^2: mod_base = OTHER; note = phosphorothioate linkage
  modified_base 2: mod_base = gm
  modified_base 3: mod_base = OTHER; note = 2'-O-methyladenosine
  modified_base 4: mod_base = um
  modified_base 5: mod_base = cm
  modified_base 6: mod_base = um
  modified_base 7: mod_base = gm
  modified_base 8: mod_base = um
  modified_base 9: mod_base = OTHER; note = 2'-fluorouridine
  modified_base 10: mod_base = OTHER; note = 2'-fluorocytidine
  modified_base 11: mod_base = OTHER; note = 2'-fluorocytidine
  modified_base 12: mod_base = OTHER; note = 2'-O-methyladenosine
  modified_base 13: mod_base = cm
  modified_base 14: mod_base = cm
  modified_base 15: mod_base = OTHER; note = 2'-O-methyladenosine
  modified_base 16: mod_base = um
  modified_base 17: mod_base = um
  modified_base 18: mod_base = gm
  modified_base 19: mod_base = OTHER; note = 2'-O-methyladenosine
  modified_base 20: mod_base = OTHER; note = 2'-O-methyladenosine
  modified_base 21: mod_base = OTHER; note = 2'-O-methyladenosine
  source 1..21: mol_type = other RNA
agatctgttccaccattgaaa

SEQ ID NO: 1411 - RNA, 21 nt, synthetic construct
  modified_base 1: mod_base = gm
  modified_base 1^2: mod_base = OTHER; note = phosphorothioate linkage
  modified_base 2: mod_base = gm
  modified_base 3: mod_base = OTHER; note = 2'-O-methyladenosine
  modified_base 4: mod_base = gm
  modified_base 5: mod_base = OTHER; note = 2'-O-methyladenosine
  modified_base 6: mod_base = um
  modified_base 7: mod_base = cm
  modified_base 8: mod_base = OTHER; note = 2'-O-methyladenosine
  modified_base 9: mod_base = OTHER; note = 2'-fluorouridine
  modified_base 10: mod_base = OTHER; note = 2'-fluoroguanosine
  modified_base 11: mod_base = OTHER; note = 2'-fluoroadenosine
  modified_base 12: mod_base = OTHER; note = 2'-O-methyladenosine
  modified_base 13: mod_base = gm
  modified_base 14: mod_base = OTHER; note = 2'-O-methyladenosine
  modified_base 15: mod_base = um
  modified_base 16: mod_base = cm
  modified_base 17: mod_base = um
  modified_base 18: mod_base = gm
  modified_base 19: mod_base = um
  modified_base 20: mod_base = um
  modified_base 21: mod_base = OTHER; note = 2'-O-methyladenosine
  source 1..21: mol_type = other RNA
ggagatcatgaagatctgtta

SEQ ID NO: 1412 - RNA, 21 nt, synthetic construct
  modified_base 1: mod_base = OTHER; note = 2'-O-methyladenosine
  modified_base 1^2: mod_base = OTHER; note = phosphorothioate linkage
  modified_base 2: mod_base = gm
  modified_base 3: mod_base = OTHER; note = 2'-O-methyladenosine
  modified_base 4: mod_base = um
  modified_base 5: mod_base = cm
  modified_base 6: mod_base = um
  modified_base 7: mod_base = gm
  modified_base 8: mod_base = um
  modified_base 9: mod_base = OTHER; note = 2'-fluorouridine
  modified_base 10: mod_base = OTHER; note = 2'-fluorocytidine
  modified_base 11: mod_base = OTHER; note = 2'-fluorocytidine
  modified_base 12: mod_base = OTHER; note = 2'-O-methyladenosine
  modified_base 13: mod_base = cm
  modified_base 14: mod_base = cm
  modified_base 15: mod_base = OTHER; note = 2'-O-methyladenosine
  modified_base 16: mod_base = um
  modified_base 17: mod_base = um
  modified_base 18: mod_base = gm
  modified_base 19: mod_base = OTHER; note = 2'-O-methyladenosine
  modified_base 20: mod_base = OTHER; note = 2'-O-methyladenosine
  modified_base 21: mod_base = OTHER; note = 2'-O-methyladenosine
  source 1..21: mol_type = other RNA
agatctgttccaccattgaaa

SEQ ID NO: 1413 - RNA, 21 nt, synthetic construct
  modified_base 1: mod_base = gm
  modified_base 1^2: mod_base = OTHER; note = phosphorothioate linkage
  modified_base 2: mod_base = OTHER; note = 2'-O-methyladenosine
  modified_base 3: mod_base = OTHER; note = 2'-O-methyladenosine
  modified_base 4: mod_base = cm
  modified_base 5: mod_base = OTHER; note = 2'-O-methyladenosine
  modified_base 6: mod_base = gm
  modified_base 7: mod_base = OTHER; note = 2'-O-methyladenosine
  modified_base 8: mod_base = OTHER; note = 2'-O-methyladenosine
  modified_base 9: mod_base = OTHER; note = 2'-fluorocytidine
  modified_base 10: mod_base = OTHER; note = 2'-fluoroadenosine
  modified_base 11: mod_base = OTHER; note = 2'-fluorocytidine
  modified_base 12: mod_base = OTHER; note = 2'-O-methyladenosine
  modified_base 13: mod_base = cm
  modified_base 14: mod_base = cm
  modified_base 15: mod_base = OTHER; note = 2'-O-methyladenosine
  modified_base 16: mod_base = OTHER; note = 2'-O-methyladenosine
  modified_base 17: mod_base = um
  modified_base 18: mod_base = OTHER; note = 2'-O-methyladenosine
  modified_base 19: mod_base = cm
  modified_base 20: mod_base = um
  modified_base 21: mod_base = OTHER; note = 2'-O-methyladenosine
  source 1..21: mol_type = other RNA
gaacagaacacaccaatacta

SEQ ID NO: 1414 - RNA, 21 nt, synthetic construct
  modified_base 1: mod_base = um
  modified_base 1^2: mod_base = OTHER; note = phosphorothioate linkage
  modified_base 2: mod_base = gm
  modified_base 3: mod_base = gm
  modified_base 4: mod_base = cm
  modified_base 5: mod_base = um
  modified_base 6: mod_base = cm
  modified_base 7: mod_base = um
  modified_base 8: mod_base = um
  modified_base 9: mod_base = OTHER; note = 2'-fluorocytidine
  modified_base 10: mod_base = OTHER; note = 2'-fluoroadenosine
  modified_base 11: mod_base = OTHER; note = 2'-fluoroadenosine
  modified_base 12: mod_base = um
  modified_base 13: mod_base = um
  modified_base 14: mod_base = gm
  modified_base 15: mod_base = um
  modified_base 16: mod_base = um
  modified_base 17: mod_base = cm
  modified_base 18: mod_base = OTHER; note = 2'-O-methyladenosine
  modified_base 19: mod_base = um
  modified_base 20: mod_base = cm
  modified_base 21: mod_base = OTHER; note = 2'-O-methyladenosine
  source 1..21: mol_type = other RNA
tggctcttcaattgttcatca

SEQ ID NO: 1415 - RNA, 21 nt, synthetic construct
  modified_base 1: mod_base = gm
  modified_base 1^2: mod_base = OTHER; note = phosphorothioate linkage
  modified_base 2: mod_base = gm
  modified_base 3: mod_base = gm
  modified_base 4: mod_base = OTHER; note = 2'-O-methyladenosine
  modified_base 5: mod_base = cm
  modified_base 6: mod_base = um
  modified_base 7: mod_base = cm
  modified_base 8: mod_base = um
  modified_base 9: mod_base = OTHER; note = 2'-fluoroadenosine
  modified_base 10: mod_base = OTHER; note = 2'-fluoroguanosine
  modified_base 11: mod_base = OTHER; note = 2'-fluorocytidine
  modified_base 12: mod_base = OTHER; note = 2'-O-methyladenosine
  modified_base 13: mod_base = um
  modified_base 14: mod_base = OTHER; note = 2'-O-methyladenosine
  modified_base 15: mod_base = cm
  modified_base 16: mod_base = um
  modified_base 17: mod_base = um
  modified_base 18: mod_base = OTHER; note = 2'-O-methyladenosine
  modified_base 19: mod_base = cm
  modified_base 20: mod_base = um
  modified_base 21: mod_base = OTHER; note = 2'-O-methyladenosine
  source 1..21: mol_type = other RNA
gggactctagcatacttacta

SEQ ID NO: 1416 - RNA, 21 nt, synthetic construct
  modified_base 1: mod_base = gm
  modified_base 1^2: mod_base = OTHER; note = phosphorothioate linkage
  modified_base 2: mod_base = cm
  modified_base 3: mod_base = gm
  modified_base 4: mod_base = OTHER; note = 2'-O-methyladenosine
  modified_base 5: mod_base = gm
  modified_base 6: mod_base = OTHER; note = 2'-O-methyladenosine
  modified_base 7: mod_base = um
  modified_base 8: mod_base = OTHER; note = 2'-O-methyladenosine
  modified_base 9: mod_base = OTHER; note = 2'-fluorocytidine
  modified_base 10: mod_base = OTHER; note = 2'-fluorouridine
  modified_base 11: mod_base = OTHER; note = 2'-fluorocytidine
  modified_base 12: mod_base = OTHER; note = 2'-O-methyladenosine
  modified_base 13: mod_base = cm
  modified_base 14: mod_base = um
  modified_base 15: mod_base = OTHER; note = 2'-O-methyladenosine
  modified_base 16: mod_base = OTHER; note = 2'-O-methyladenosine
  modified_base 17: mod_base = OTHER; note = 2 -O-methylinosine
  modified_base 18: mod_base = OTHER; note = 2'-O-methyladenosine
  modified_base 19: mod_base = cm
  modified_base 20: mod_base = cm
  modified_base 21: mod_base = OTHER; note = 2'-O-methyladenosine
  source 1..21: mol_type = other RNA
gcgagatactcactaanacca

SEQ ID NO: 1417 - RNA, 21 nt, synthetic construct
  modified_base 1: mod_base = gm
  modified_base 1^2: mod_base = OTHER; note = phosphorothioate linkage
  modified_base 2: mod_base = gm
  modified_base 3: mod_base = um
  modified_base 4: mod_base = cm
  modified_base 5: mod_base = gm
  modified_base 6: mod_base = OTHER; note = 2'-O-methyladenosine
  modified_base 7: mod_base = OTHER; note = 2'-O-methyladenosine
  modified_base 8: mod_base = OTHER; note = 2'-O-methyladenosine
  modified_base 9: mod_base = OTHER; note = 2'-fluoroguanosine
  modified_base 10: mod_base = OTHER; note = 2'-fluoroguanosine
  modified_base 11: mod_base = OTHER; note = 2'-fluorouridine
  modified_base 12: mod_base = um
  modified_base 13: mod_base = gm
  modified_base 14: mod_base = OTHER; note = 2'-O-methyladenosine
  modified_base 15: mod_base = OTHER; note = 2'-O-methyladenosine
  modified_base 16: mod_base = OTHER; note = 2'-O-methyladenosine
  modified_base 17: mod_base = cm
  modified_base 18: mod_base = OTHER; note = 2'-O-methyladenosine
  modified_base 19: mod_base = um
  modified_base 20: mod_base = gm
  modified_base 21: mod_base = OTHER; note = 2'-O-methyladenosine
  source 1..21: mol_type = other RNA
ggtcgaaaggttgaaacatga

SEQ ID NO: 1418 - RNA, 21 nt, synthetic construct
  modified_base 1: mod_base = um
  modified_base 1^2: mod_base = OTHER; note = phosphorothioate linkage
  modified_base 2: mod_base = gm
  modified_base 3: mod_base = OTHER; note = 2'-O-methyladenosine
  modified_base 4: mod_base = um
  modified_base 5: mod_base = gm
  modified_base 6: mod_base = gm
  modified_base 7: mod_base = um
  modified_base 8: mod_base = gm
  modified_base 9: mod_base = OTHER; note = 2'-fluoroguanosine
  modified_base 10: mod_base = OTHER; note = 2'-fluorocytidine
  modified_base 11: mod_base = OTHER; note = 2'-fluoroguanosine
  modified_base 12: mod_base = um
  modified_base 13: mod_base = OTHER; note = 2'-O-methyladenosine
  modified_base 14: mod_base = cm
  modified_base 15: mod_base = OTHER; note = 2'-O-methyladenosine
  modified_base 16: mod_base = um
  modified_base 17: mod_base = gm
  modified_base 18: mod_base = cm
  modified_base 19: mod_base = um
  modified_base 20: mod_base = OTHER; note = 2'-O-methyladenosine
  modified_base 21: mod_base = OTHER; note = 2'-O-methyladenosine
  source 1..21: mol_type = other RNA
tgatggtggcgtacatgctaa

SEQ ID NO: 1419 - RNA, 21 nt, synthetic construct
  modified_base 1: mod_base = OTHER; note = 2'-O-methyladenosine
  modified_base 1^2: mod_base = OTHER; note = phosphorothioate linkage
  modified_base 2: mod_base = gm
  modified_base 3: mod_base = gm
  modified_base 4: mod_base = OTHER; note = 2'-O-methyladenosine
  modified_base 5: mod_base = cm
  modified_base 6: mod_base = OTHER; note = 2'-O-methyladenosine
  modified_base 7: mod_base = OTHER; note = 2'-O-methyladenosine
  modified_base 8: mod_base = gm
  modified_base 9: mod_base = OTHER; note = 2'-fluorocytidine
  modified_base 10: mod_base = OTHER; note = 2'-fluoroguanosine
  modified_base 11: mod_base = OTHER; note = 2'-fluoroguanosine
  modified_base 12: mod_base = OTHER; note = 2'-O-methyladenosine
  modified_base 13: mod_base = um
  modified_base 14: mod_base = cm
  modified_base 15: mod_base = OTHER; note = 2'-O-methyladenosine
  modified_base 16: mod_base = um
  modified_base 17: mod_base = cm
  modified_base 18: mod_base = OTHER; note = 2'-O-methyladenosine
  modified_base 19: mod_base = gm
  modified_base 20: mod_base = um
  modified_base 21: mod_base = OTHER; note = 2'-O-methyladenosine
  source 1..21: mol_type = other RNA
aggacaagcggatcatcagta

SEQ ID NO: 1420 - RNA, 21 nt, synthetic construct
  modified_base 1: mod_base = gm
  modified_base 1^2: mod_base = OTHER; note = phosphorothioate linkage
  modified_base 2: mod_base = gm
  modified_base 3: mod_base = gm
  modified_base 4: mod_base = OTHER; note = 2'-O-methyladenosine
  modified_base 5: mod_base = cm
  modified_base 6: mod_base = um
  modified_base 7: mod_base = cm
  modified_base 8: mod_base = um
  modified_base 9: mod_base = OTHER; note = 2'-fluoroadenosine
  modified_base 10: mod_base = OTHER; note = 2'-fluoroguanosine
  modified_base 11: mod_base = OTHER; note = 2'-fluorocytidine
  modified_base 12: mod_base = OTHER; note = 2'-O-methyladenosine
  modified_base 13: mod_base = um
  modified_base 14: mod_base = OTHER; note = 2'-O-methyladenosine
  modified_base 15: mod_base = cm
  modified_base 16: mod_base = um
  modified_base 17: mod_base = um
  modified_base 18: mod_base = OTHER; note = 2'-O-methyladenosine
  modified_base 19: mod_base = cm
  modified_base 20: mod_base = um
  modified_base 21: mod_base = OTHER; note = 2'-O-methyladenosine
  source 1..21: mol_type = other RNA
gggactctagcatacttacta

SEQ ID NO: 1421 - RNA, 21 nt, synthetic construct
  modified_base 1: mod_base = um
  modified_base 1^2: mod_base = OTHER; note = phosphorothioate linkage
  modified_base 2: mod_base = cm
  modified_base 3: mod_base = gm
  modified_base 4: mod_base = cm
  modified_base 5: mod_base = um
  modified_base 6: mod_base = gm
  modified_base 7: mod_base = cm
  modified_base 8: mod_base = um
  modified_base 9: mod_base = OTHER; note = 2'-fluoroadenosine
  modified_base 10: mod_base = OTHER; note = 2'-fluoroguanosine
  modified_base 11: mod_base = OTHER; note = 2'-fluoroadenosine
  modified_base 12: mod_base = OTHER; note = 2'-O-methyladenosine
  modified_base 13: mod_base = OTHER; note = 2'-O-methyladenosine
  modified_base 14: mod_base = cm
  modified_base 15: mod_base = OTHER; note = 2'-O-methyladenosine
  modified_base 16: mod_base = um
  modified_base 17: mod_base = OTHER; note = 2'-O-methyladenosine
  modified_base 18: mod_base = gm
  modified_base 19: mod_base = um
  modified_base 20: mod_base = OTHER; note = 2'-O-methyladenosine
  modified_base 21: mod_base = OTHER; note = 2'-O-methyladenosine
  source 1..21: mol_type = other RNA
tcgctgctagaaacatagtaa

SEQ ID NO: 1422 - RNA, 21 nt, synthetic construct
  modified_base 1: mod_base = um
  modified_base 1^2: mod_base = OTHER; note = phosphorothioate linkage
  modified_base 2: mod_base = cm
  modified_base 3: mod_base = cm
  modified_base 4: mod_base = OTHER; note = 2'-O-methyladenosine
  modified_base 5: mod_base = gm
  modified_base 6: mod_base = um
  modified_base 7: mod_base = OTHER; note = 2'-O-methyladenosine
  modified_base 8: mod_base = um
  modified_base 9: mod_base = OTHER; note = 2'-fluorouridine
  modified_base 10: mod_base = OTHER; note = 2'-fluorocytidine
  modified_base 11: mod_base = OTHER; note = 2'-fluoroadenosine
  modified_base 12: mod_base = OTHER; note = 2'-O-methyladenosine
  modified_base 13: mod_base = um
  modified_base 14: mod_base = um
  modified_base 15: mod_base = OTHER; note = 2'-O-methyladenosine
  modified_base 16: mod_base = cm
  modified_base 17: mod_base = OTHER; note = 2'-O-methyladenosine
  modified_base 18: mod_base = OTHER; note = 2'-O-methyladenosine
  modified_base 19: mod_base = cm
  modified_base 20: mod_base = OTHER; note = 2'-O-methyladenosine
  modified_base 21: mod_base = OTHER; note = 2'-O-methyladenosine
  source 1..21: mol_type = other RNA
tccagtattcaattacaacaa

SEQ ID NO: 1423 - RNA, 21 nt, synthetic construct
  modified_base 1: mod_base = gm
  modified_base 1^2: mod_base = OTHER; note = phosphorothioate linkage
  modified_base 2: mod_base = cm
  modified_base 3: mod_base = cm
  modified_base 4: mod_base = um
  modified_base 5: mod_base = um
  modified_base 6: mod_base = cm
  modified_base 7: mod_base = cm
  modified_base 8: mod_base = um
  modified_base 9: mod_base = OTHER; note = 2'-fluorouridine
  modified_base 10: mod_base = OTHER; note = 2'-fluorouridine
  modified_base 11: mod_base = OTHER; note = 2'-fluoroguanosine
  modified_base 12: mod_base = OTHER; note = 2'-O-methyladenosine
  modified_base 13: mod_base = cm
  modified_base 14: mod_base = OTHER; note = 2'-O-methyladenosine
  modified_base 15: mod_base = um
  modified_base 16: mod_base = gm
  modified_base 17: mod_base = OTHER; note = 2'-O-methyladenosine
  modified_base 18: mod_base = gm
  modified_base 19: mod_base = um
  modified_base 20: mod_base = OTHER; note = 2'-O-methyladenosine
  modified_base 21: mod_base = OTHER; note = 2'-O-methyladenosine
  source 1..21: mol_type = other RNA
gccttcctttgacatgagtaa

SEQ ID NO: 1424 - RNA, 21 nt, synthetic construct
  modified_base 1: mod_base = gm
  modified_base 1^2: mod_base = OTHER; note = phosphorothioate linkage
  modified_base 2: mod_base = cm
  modified_base 3: mod_base = um
  modified_base 4: mod_base = cm
  modified_base 5: mod_base = um
  modified_base 6: mod_base = OTHER; note = 2'-O-methyladenosine
  modified_base 7: mod_base = OTHER; note = 2'-O-methyladenosine
  modified_base 8: mod_base = um
  modified_base 9: mod_base = OTHER; note = 2'-fluoroguanosine
  modified_base 10: mod_base = OTHER; note = 2'-fluorocytidine
  modified_base 11: mod_base = OTHER; note = 2'-fluoroadenosine
  modified_base 12: mod_base = OTHER; note = 2'-O-methyladenosine
  modified_base 13: mod_base = gm
  modified_base 14: mod_base = gm
  modified_base 15: mod_base = um
  modified_base 16: mod_base = um
  modified_base 17: mod_base = cm
  modified_base 18: mod_base = OTHER; note = 2'-O-methyladenosine
  modified_base 19: mod_base = OTHER; note = 2'-O-methyladenosine
  modified_base 20: mod_base = cm
  modified_base 21: mod_base = OTHER; note = 2'-O-methyladenosine
  source 1..21: mol_type = other RNA
gctctaatgcaaggttcaaca

SEQ ID NO: 1425 - RNA, 21 nt, synthetic construct
  modified_base 1: mod_base = OTHER; note = 2'-O-methyladenosine
  modified_base 1^2: mod_base = OTHER; note = phosphorothioate linkage
  modified_base 2: mod_base = cm
  modified_base 3: mod_base = gm
  modified_base 4: mod_base = OTHER; note = 2'-O-methyladenosine
  modified_base 5: mod_base = cm
  modified_base 6: mod_base = um
  modified_base 7: mod_base = OTHER; note = 2'-O-methyladenosine
  modified_base 8: mod_base = OTHER; note = 2'-O-methyladenosine
  modified_base 9: mod_base = OTHER; note = 2'-fluorouridine
  modified_base 10: mod_base = OTHER; note = 2'-fluorocytidine
  modified_base 11: mod_base = OTHER; note = 2'-fluorocytidine
  modified_base 12: mod_base = OTHER; note = 2'-O-methyladenosine
  modified_base 13: mod_base = gm
  modified_base 14: mod_base = OTHER; note = 2'-O-methyladenosine
  modified_base 15: mod_base = OTHER; note = 2'-O-methyladenosine
  modified_base 16: mod_base = um
  modified_base 17: mod_base = OTHER; note = 2'-O-methyladenosine
  modified_base 18: mod_base = gm
  modified_base 19: mod_base = cm
  modified_base 20: mod_base = OTHER; note = 2'-O-methyladenosine
  modified_base 21: mod_base = um
  source 1..21: mol_type = other RNA
acgactaatccagaatagcat

SEQ ID NO: 1426 - RNA, 21 nt, synthetic construct
  modified_base 1: mod_base = gm
  modified_base 1^2: mod_base = OTHER; note = phosphorothioate linkage
  modified_base 2: mod_base = OTHER; note = 2'-O-methyladenosine
  modified_base 3: mod_base = um
  modified_base 4: mod_base = cm
  modified_base 5: mod_base = OTHER; note = 2'-O-methyladenosine
  modified_base 6: mod_base = gm
  modified_base 7: mod_base = OTHER; note = 2'-O-methyladenosine
  modified_base 8: mod_base = OTHER; note = 2'-O-methyladenosine
  modified_base 9: mod_base = OTHER; note = 2'-fluorouridine
  modified_base 10: mod_base = OTHER; note = 2'-fluoroguanosine
  modified_base 11: mod_base = OTHER; note = 2'-fluoroadenosine
  modified_base 12: mod_base = um
  modified_base 13: mod_base = cm
  modified_base 14: mod_base = OTHER; note = 2'-O-methyladenosine
  modified_base 15: mod_base = OTHER; note = 2'-O-methyladenosine
  modified_base 16: mod_base = OTHER; note = 2'-O-methyladenosine
  modified_base 17: mod_base = cm
  modified_base 18: mod_base = OTHER; note = 2 -O-methylinosine
  modified_base 19: mod_base = um
  modified_base 20: mod_base = gm
  modified_base 21: mod_base = OTHER; note = 2'-O-methyladenosine
  source 1..21: mol_type = other RNA
gatcagaatgatcaaacntga

SEQ ID NO: 1427 - RNA, 21 nt, synthetic construct
  modified_base 1: mod_base = gm
  modified_base 1^2: mod_base = OTHER; note = phosphorothioate linkage
  modified_base 2: mod_base = cm
  modified_base 3: mod_base = cm
  modified_base 4: mod_base = um
  modified_base 5: mod_base = um
  modified_base 6: mod_base = cm
  modified_base 7: mod_base = cm
  modified_base 8: mod_base = um
  modified_base 9: mod_base = OTHER; note = 2'-fluorouridine
  modified_base 10: mod_base = OTHER; note = 2'-fluorouridine
  modified_base 11: mod_base = OTHER; note = 2'-fluoroguanosine
  modified_base 12: mod_base = OTHER; note = 2'-O-methyladenosine
  modified_base 13: mod_base = cm
  modified_base 14: mod_base = OTHER; note = 2'-O-methyladenosine
  modified_base 15: mod_base = um
  modified_base 16: mod_base = gm
  modified_base 17: mod_base = OTHER; note = 2'-O-methyladenosine
  modified_base 18: mod_base = gm
  modified_base 19: mod_base = um
  modified_base 20: mod_base = OTHER; note = 2'-O-methyladenosine
  modified_base 21: mod_base = OTHER; note = 2'-O-methyladenosine
  source 1..21: mol_type = other RNA
gccttcctttgacatgagtaa

SEQ ID NO: 1428 - RNA, 21 nt, synthetic construct
  modified_base 1: mod_base = cm
  modified_base 1^2: mod_base = OTHER; note = phosphorothioate linkage
  modified_base 2: mod_base = um
  modified_base 3: mod_base = gm
  modified_base 4: mod_base = um
  modified_base 5: mod_base = cm
  modified_base 6: mod_base = gm
  modified_base 7: mod_base = gm
  modified_base 8: mod_base = OTHER; note = 2'-O-methyladenosine
  modified_base 9: mod_base = OTHER; note = 2'-fluoroadenosine
  modified_base 10: mod_base = OTHER; note = 2'-fluoroguanosine
  modified_base 11: mod_base = OTHER; note = 2'-fluoroadenosine
  modified_base 12: mod_base = OTHER; note = 2'-O-methyladenosine
  modified_base 13: mod_base = um
  modified_base 14: mod_base = gm
  modified_base 15: mod_base = OTHER; note = 2'-O-methyladenosine
  modified_base 16: mod_base = um
  modified_base 17: mod_base = um
  modified_base 18: mod_base = gm
  modified_base 19: mod_base = gm
  modified_base 20: mod_base = um
  modified_base 21: mod_base = OTHER; note = 2'-O-methyladenosine
  source 1..21: mol_type = other RNA
ctgtcggaagaatgattggta

SEQ ID NO: 1429 - RNA, 21 nt, synthetic construct
  modified_base 1: mod_base = OTHER; note = 2'-O-methyladenosine
  modified_base 1^2: mod_base = OTHER; note = phosphorothioate linkage
  modified_base 2: mod_base = gm
  modified_base 3: mod_base = OTHER; note = 2'-O-methyladenosine
  modified_base 4: mod_base = gm
  modified_base 5: mod_base = OTHER; note = 2'-O-methyladenosine
  modified_base 6: mod_base = gm
  modified_base 7: mod_base = gm
  modified_base 8: mod_base = OTHER; note = 2'-O-methyladenosine
  modified_base 9: mod_base = OTHER; note = 2'-fluorouridine
  modified_base 10: mod_base = OTHER; note = 2'-fluoroguanosine
  modified_base 11: mod_base = OTHER; note = 2'-fluoroguanosine
  modified_base 12: mod_base = um
  modified_base 13: mod_base = gm
  modified_base 14: mod_base = cm
  modified_base 15: mod_base = um
  modified_base 16: mod_base = um
  modified_base 17: mod_base = um
  modified_base 18: mod_base = cm
  modified_base 19: mod_base = um
  modified_base 20: mod_base = gm
  modified_base 21: mod_base = OTHER; note = 2'-O-methyladenosine
  source 1..21: mol_type = other RNA
agagaggatggtgctttctga

SEQ ID NO: 1430 - RNA, 21 nt, synthetic construct
  modified_base 1: mod_base = cm
  modified_base 1^2: mod_base = OTHER; note = phosphorothioate linkage
  modified_base 2: mod_base = um
  modified_base 3: mod_base = gm
  modified_base 4: mod_base = OTHER; note = 2'-O-methyladenosine
  modified_base 5: mod_base = OTHER; note = 2'-O-methyladenosine
  modified_base 6: mod_base = um
  modified_base 7: mod_base = gm
  modified_base 8: mod_base = OTHER; note = 2'-O-methyladenosine
  modified_base 9: mod_base = OTHER; note = 2'-fluorouridine
  modified_base 10: mod_base = OTHER; note = 2'-fluoroguanosine
  modified_base 11: mod_base = OTHER; note = 2'-fluorocytidine
  modified_base 12: mod_base = cm
  modified_base 13: mod_base = OTHER; note = 2'-O-methyladenosine
  modified_base 14: mod_base = cm
  modified_base 15: mod_base = OTHER; note = 2'-O-methyladenosine
  modified_base 16: mod_base = um
  modified_base 17: mod_base = OTHER; note = 2'-O-methyladenosine
  modified_base 18: mod_base = um
  modified_base 19: mod_base = cm
  modified_base 20: mod_base = OTHER; note = 2'-O-methyladenosine
  modified_base 21: mod_base = OTHER; note = 2'-O-methyladenosine
  source 1..21: mol_type = other RNA
ctgaatgatgccacatatcaa

SEQ ID NO: 1431 - RNA, 21 nt, synthetic construct
  modified_base 1: mod_base = OTHER; note = 2'-O-methyladenosine
  modified_base 1^2: mod_base = OTHER; note = phosphorothioate linkage
  modified_base 2: mod_base = cm
  modified_base 3: mod_base = gm
  modified_base 4: mod_base = gm
  modified_base 5: mod_base = um
  modified_base 6: mod_base = cm
  modified_base 7: mod_base = OTHER; note = 2'-O-methyladenosine
  modified_base 8: mod_base = gm
  modified_base 9: mod_base = OTHER; note = 2'-fluorocytidine
  modified_base 10: mod_base = OTHER; note = 2'-fluoroadenosine
  modified_base 11: mod_base = OTHER; note = 2'-fluorocytidine
  modified_base 12: mod_base = um
  modified_base 13: mod_base = cm
  modified_base 14: mod_base = OTHER; note = 2'-O-methyladenosine
  modified_base 15: mod_base = um
  modified_base 16: mod_base = um
  modified_base 17: mod_base = cm
  modified_base 18: mod_base = um
  modified_base 19: mod_base = gm
  modified_base 20: mod_base = OTHER; note = 2'-O-methyladenosine
  modified_base 21: mod_base = OTHER; note = 2'-O-methyladenosine
  source 1..21: mol_type = other RNA
acggtcagcactcattctgaa

SEQ ID NO: 1432 - RNA, 21 nt, synthetic construct
  modified_base 1: mod_base = gm
  modified_base 1^2: mod_base = OTHER; note = phosphorothioate linkage
  modified_base 2: mod_base = cm
  modified_base 3: mod_base = um
  modified_base 4: mod_base = cm
  modified_base 5: mod_base = OTHER; note = 2'-O-methyladenosine
  modified_base 6: mod_base = cm
  modified_base 7: mod_base = OTHER; note = 2'-O-methyladenosine
  modified_base 8: mod_base = OTHER; note = 2'-O-methyladenosine
  modified_base 9: mod_base = OTHER; note = 2'-fluoroguanosine
  modified_base 10: mod_base = OTHER; note = 2'-fluoroadenosine
  modified_base 11: mod_base = OTHER; note = 2'-fluoroguanosine
  modified_base 12: mod_base = um
  modified_base 13: mod_base = cm
  modified_base 14: mod_base = OTHER; note = 2'-O-methyladenosine
  modified_base 15: mod_base = OTHER; note = 2'-O-methyladenosine
  modified_base 16: mod_base = um
  modified_base 17: mod_base = um
  modified_base 18: mod_base = gm
  modified_base 19: mod_base = gm
  modified_base 20: mod_base = um
  modified_base 21: mod_base = OTHER; note = 2'-O-methyladenosine
  source 1..21: mol_type = other RNA
gctcacaagagtcaattggta

SEQ ID NO: 1433 - RNA, 21 nt, synthetic construct
  modified_base 1: mod_base = gm
  modified_base 1^2: mod_base = OTHER; note = phosphorothioate linkage
  modified_base 2: mod_base = um
  modified_base 3: mod_base = OTHER; note = 2'-O-methyladenosine
  modified_base 4: mod_base = OTHER; note = 2'-O-methyladenosine
  modified_base 5: mod_base = um
  modified_base 6: mod_base = gm
  modified_base 7: mod_base = OTHER; note = 2'-O-methyladenosine
  modified_base 8: mod_base = OTHER; note = 2'-O-methyladenosine
  modified_base 9: mod_base = OTHER; note = 2'-fluoroguanosine
  modified_base 10: mod_base = OTHER; note = 2'-fluoroguanosine
  modified_base 11: mod_base = OTHER; note = 2'-fluoroguanosine
  modified_base 12: mod_base = um
  modified_base 13: mod_base = cm
  modified_base 14: mod_base = um
  modified_base 15: mod_base = um
  modified_base 16: mod_base = OTHER; note = 2'-O-methyladenosine
  modified_base 17: mod_base = um
  modified_base 18: mod_base = um
  modified_base 19: mod_base = um
  modified_base 20: mod_base = cm
  modified_base 21: mod_base = um
  source 1..21: mol_type = other RNA
gtaatgaagggtcttatttct

SEQ ID NO: 1434 - RNA, 21 nt, synthetic construct
  modified_base 1: mod_base = gm
  modified_base 1^2: mod_base = OTHER; note = phosphorothioate linkage
  modified_base 2: mod_base = OTHER; note = 2'-O-methyladenosine
  modified_base 3: mod_base = cm
  modified_base 4: mod_base = um
  modified_base 5: mod_base = um
  modified_base 6: mod_base = um
  modified_base 7: mod_base = gm
  modified_base 8: mod_base = um
  modified_base 9: mod_base = OTHER; note = 2'-fluoroguanosine
  modified_base 10: mod_base = OTHER; note = 2'-fluorocytidine
  modified_base 11: mod_base = OTHER; note = 2'-fluoroguanosine
  modified_base 12: mod_base = OTHER; note = 2'-O-methyladenosine
  modified_base 13: mod_base = cm
  modified_base 14: mod_base = OTHER; note = 2'-O-methyladenosine
  modified_base 15: mod_base = OTHER; note = 2'-O-methyladenosine
  modified_base 16: mod_base = um
  modified_base 17: mod_base = gm
  modified_base 18: mod_base = cm
  modified_base 19: mod_base = um
  modified_base 20: mod_base = um
  modified_base 21: mod_base = OTHER; note = 2'-O-methyladenosine
  source 1..21: mol_type = other RNA
gactttgtgcgacaatgctta

SEQ ID NO: 1435 - RNA, 21 nt, synthetic construct
  modified_base 1: mod_base = cm
  modified_base 1^2: mod_base = OTHER; note = phosphorothioate linkage
  modified_base 2: mod_base = cm
  modified_base 3: mod_base = OTHER; note = 2'-O-methyladenosine
  modified_base 4: mod_base = cm
  modified_base 5: mod_base = um
  modified_base 6: mod_base = OTHER; note = 2'-O-methyladenosine
  modified_base 7: mod_base = um
  modified_base 8: mod_base = OTHER; note = 2'-O-methyladenosine
  modified_base 9: mod_base = OTHER; note = 2'-fluorouridine
  modified_base 10: mod_base = OTHER; note = 2'-fluoroguanosine
  modified_base 11: mod_base = OTHER; note = 2'-fluoroadenosine
  modified_base 12: mod_base = um
  modified_base 13: mod_base = gm
  modified_base 14: mod_base = cm
  modified_base 15: mod_base = OTHER; note = 2'-O-methyladenosine
  modified_base 16: mod_base = OTHER; note = 2'-O-methyladenosine
  modified_base 17: mod_base = um
  modified_base 18: mod_base = cm
  modified_base 19: mod_base = OTHER; note = 2'-O-methyladenosine
  modified_base 20: mod_base = OTHER; note = 2'-O-methyladenosine
  modified_base 21: mod_base = OTHER; note = 2'-O-methyladenosine
  source 1..21: mol_type = other RNA
ccactatatgatgcaatcaaa

SEQ ID NO: 1436 - RNA, 21 nt, synthetic construct
  modified_base 1: mod_base = gm
  modified_base 1^2: mod_base = OTHER; note = phosphorothioate linkage
  modified_base 2: mod_base = OTHER; note = 2 -O-methyl-2-aminoadenosine
  modified_base 3: mod_base = OTHER; note = 2'-O-methyladenosine
  modified_base 4: mod_base = um
  modified_base 5: mod_base = cm
  modified_base 6: mod_base = OTHER; note = 2'-O-methyladenosine
  modified_base 7: mod_base = OTHER; note = 2'-O-methyladenosine
  modified_base 8: mod_base = OTHER; note = 2'-O-methyladenosine
  modified_base 9: mod_base = OTHER; note = 2'-fluoroadenosine
  modified_base 10: mod_base = OTHER; note = 2'-fluorocytidine
  modified_base 11: mod_base = OTHER; note = 2'-fluorouridine
  modified_base 12: mod_base = OTHER; note = 2'-O-methyladenosine
  modified_base 13: mod_base = gm
  modified_base 14: mod_base = gm
  modified_base 15: mod_base = cm
  modified_base 16: mod_base = um
  modified_base 17: mod_base = um
  modified_base 18: mod_base = um
  modified_base 19: mod_base = um
  modified_base 20: mod_base = cm
  modified_base 21: mod_base = OTHER; note = 2'-O-methyladenosine
  source 1..21: mol_type = other RNA
gaatcaaaactaggcttttca

SEQ ID NO: 1437 - RNA, 21 nt, synthetic construct
  modified_base 1: mod_base = um
  modified_base 1^2: mod_base = OTHER; note = phosphorothioate linkage
  modified_base 2: mod_base = gm
  modified_base 3: mod_base = cm
  modified_base 4: mod_base = OTHER; note = 2'-O-methyladenosine
  modified_base 5: mod_base = OTHER; note = 2'-O-methyladenosine
  modified_base 6: mod_base = OTHER; note = 2'-O-methyladenosine
  modified_base 7: mod_base = gm
  modified_base 8: mod_base = OTHER; note = 2'-O-methyladenosine
  modified_base 9: mod_base = OTHER; note = 2'-fluorouridine
  modified_base 10: mod_base = OTHER; note = 2'-fluoroguanosine
  modified_base 11: mod_base = OTHER; note = 2'-fluorouridine
  modified_base 12: mod_base = um
  modified_base 13: mod_base = gm
  modified_base 14: mod_base = gm
  modified_base 15: mod_base = OTHER; note = 2'-O-methyladenosine
  modified_base 16: mod_base = OTHER; note = 2 -O-methylinosine
  modified_base 17: mod_base = OTHER; note = 2'-O-methyladenosine
  modified_base 18: mod_base = cm
  modified_base 19: mod_base = cm
  modified_base 20: mod_base = um
  modified_base 21: mod_base = um
  source 1..21: mol_type = other RNA
tgcaaagatgttgganacctt

SEQ ID NO: 1438 - RNA, 21 nt, synthetic construct
  modified_base 1: mod_base = cm
  modified_base 1^2: mod_base = OTHER; note = phosphorothioate linkage
  modified_base 2: mod_base = gm
  modified_base 3: mod_base = OTHER; note = 2'-O-methyladenosine
  modified_base 4: mod_base = gm
  modified_base 5: mod_base = gm
  modified_base 6: mod_base = OTHER; note = 2'-O-methyladenosine
  modified_base 7: mod_base = gm
  modified_base 8: mod_base = um
  modified_base 9: mod_base = OTHER; note = 2'-fluoroguanosine
  modified_base 10: mod_base = OTHER; note = 2'-fluorocytidine
  modified_base 11: mod_base = OTHER; note = 2'-fluorocytidine
  modified_base 12: mod_base = um
  modified_base 13: mod_base = gm
  modified_base 14: mod_base = OTHER; note = 2'-O-methyladenosine
  modified_base 15: mod_base = um
  modified_base 16: mod_base = um
  modified_base 17: mod_base = OTHER; note = 2'-O-methyladenosine
  modified_base 18: mod_base = OTHER; note = 2'-O-methyladenosine
  modified_base 19: mod_base = um
  modified_base 20: mod_base = gm
  modified_base 21: mod_base = OTHER; note = 2'-O-methyladenosine
  source 1..21: mol_type = other RNA
cgaggagtgcctgattaatga

SEQ ID NO: 1439 - RNA, 21 nt, synthetic construct
  modified_base 1: mod_base = gm
  modified_base 1^2: mod_base = OTHER; note = phosphorothioate linkage
  modified_base 2: mod_base = OTHER; note = 2'-O-methyladenosine
  modified_base 3: mod_base = cm
  modified_base 4: mod_base = um
  modified_base 5: mod_base = um
  modified_base 6: mod_base = um
  modified_base 7: mod_base = gm
  modified_base 8: mod_base = um
  modified_base 9: mod_base = OTHER; note = 2'-fluoroguanosine
  modified_base 10: mod_base = OTHER; note = 2'-fluorocytidine
  modified_base 11: mod_base = OTHER; note = 2'-fluoroguanosine
  modified_base 12: mod_base = OTHER; note = 2'-O-methyladenosine
  modified_base 13: mod_base = cm
  modified_base 14: mod_base = OTHER; note = 2'-O-methyladenosine
  modified_base 15: mod_base = OTHER; note = 2'-O-methyladenosine
  modified_base 16: mod_base = um
  modified_base 17: mod_base = gm
  modified_base 18: mod_base = cm
  modified_base 19: mod_base = um
  modified_base 20: mod_base = um
  modified_base 21: mod_base = OTHER; note = 2'-O-methyladenosine
  source 1..21: mol_type = other RNA
gactttgtgcgacaatgctta

SEQ ID NO: 1440 - RNA, 21 nt, synthetic construct
  modified_base 1: mod_base = cm
  modified_base 1^2: mod_base = OTHER; note = phosphorothioate linkage
  modified_base 2: mod_base = cm
  modified_base 3: mod_base = OTHER; note = 2'-O-methyladenosine
  modified_base 4: mod_base = cm
  modified_base 5: mod_base = um
  modified_base 6: mod_base = OTHER; note = 2'-O-methyladenosine
  modified_base 7: mod_base = um
  modified_base 8: mod_base = OTHER; note = 2'-O-methyladenosine
  modified_base 9: mod_base = OTHER; note = 2'-fluorouridine
  modified_base 10: mod_base = OTHER; note = 2'-fluoroguanosine
  modified_base 11: mod_base = OTHER; note = 2'-fluoroadenosine
  modified_base 12: mod_base = um
  modified_base 13: mod_base = gm
  modified_base 14: mod_base = cm
  modified_base 15: mod_base = OTHER; note = 2'-O-methyladenosine
  modified_base 16: mod_base = OTHER; note = 2'-O-methyladenosine
  modified_base 17: mod_base = um
  modified_base 18: mod_base = cm
  modified_base 19: mod_base = OTHER; note = 2'-O-methyladenosine
  modified_base 20: mod_base = OTHER; note = 2'-O-methyladenosine
  modified_base 21: mod_base = OTHER; note = 2'-O-methyladenosine
  source 1..21: mol_type = other RNA
ccactatatgatgcaatcaaa

SEQ ID NO: 1441 - RNA, 21 nt, synthetic construct
  modified_base 1: mod_base = gm
  modified_base 1^2: mod_base = OTHER; note = phosphorothioate linkage
  modified_base 2: mod_base = gm
  modified_base 3: mod_base = um
  modified_base 4: mod_base = OTHER; note = 2'-O-methyladenosine
  modified_base 5: mod_base = um
  modified_base 6: mod_base = um
  modified_base 7: mod_base = cm
  modified_base 8: mod_base = gm
  modified_base 9: mod_base = OTHER; note = 2'-fluoroguanosine
  modified_base 10: mod_base = OTHER; note = 2'-fluoroadenosine
  modified_base 11: mod_base = OTHER; note = 2'-fluorouridine
  modified_base 12: mod_base = um
  modified_base 13: mod_base = um
  modified_base 14: mod_base = cm
  modified_base 15: mod_base = cm
  modified_base 16: mod_base = OTHER; note = 2'-O-methyladenosine
  modified_base 17: mod_base = um
  modified_base 18: mod_base = um
  modified_base 19: mod_base = um
  modified_base 20: mod_base = cm
  modified_base 21: mod_base = OTHER; note = 2'-O-methyladenosine
  source 1..21: mol_type = other RNA
ggtattcggatttccatttca

SEQ ID NO: 1442 - RNA, 21 nt, synthetic construct
  modified_base 1: mod_base = gm
  modified_base 1^2: mod_base = OTHER; note = phosphorothioate linkage
  modified_base 2: mod_base = cm
  modified_base 3: mod_base = cm
  modified_base 4: mod_base = um
  modified_base 5: mod_base = OTHER; note = 2'-O-methyladenosine
  modified_base 6: mod_base = um
  modified_base 7: mod_base = gm
  modified_base 8: mod_base = um
  modified_base 9: mod_base = OTHER; note = 2'-fluoroadenosine
  modified_base 10: mod_base = OTHER; note = 2'-fluoroguanosine
  modified_base 11: mod_base = OTHER; note = 2'-fluoroadenosine
  modified_base 12: mod_base = um
  modified_base 13: mod_base = gm
  modified_base 14: mod_base = gm
  modified_base 15: mod_base = OTHER; note = 2'-O-methyladenosine
  modified_base 16: mod_base = um
  modified_base 17: mod_base = um
  modified_base 18: mod_base = cm
  modified_base 19: mod_base = gm
  modified_base 20: mod_base = OTHER; note = 2'-O-methyladenosine
  modified_base 21: mod_base = OTHER; note = 2'-O-methyladenosine
  source 1..21: mol_type = other RNA
gcctatgtagatggattcgaa

SEQ ID NO: 1443 - RNA, 21 nt, synthetic construct
  modified_base 1: mod_base = OTHER; note = 2'-O-methyladenosine
  modified_base 1^2: mod_base = OTHER; note = phosphorothioate linkage
  modified_base 2: mod_base = um
  modified_base 3: mod_base = cm
  modified_base 4: mod_base = cm
  modified_base 5: mod_base = cm
  modified_base 6: mod_base = OTHER; note = 2'-O-methyladenosine
  modified_base 7: mod_base = OTHER; note = 2'-O-methyladenosine
  modified_base 8: mod_base = um
  modified_base 9: mod_base = OTHER; note = 2'-fluoroguanosine
  modified_base 10: mod_base = OTHER; note = 2 -O-methyl-2-aminoadenosine
  modified_base 11: mod_base = OTHER; note = 2'-fluorouridine
  modified_base 12: mod_base = OTHER; note = 2'-O-methyladenosine
  modified_base 13: mod_base = OTHER; note = 2'-O-methyladenosine
  modified_base 14: mod_base = gm
  modified_base 15: mod_base = cm
  modified_base 16: mod_base = OTHER; note = 2'-O-methyladenosine
  modified_base 17: mod_base = OTHER; note = 2'-O-methyladenosine
  modified_base 18: mod_base = OTHER; note = 2'-O-methyladenosine
  modified_base 19: mod_base = um
  modified_base 20: mod_base = gm
  modified_base 21: mod_base = um
  source 1..21: mol_type = other RNA
atcccaatgataagcaaatgt

SEQ ID NO: 1444 - RNA, 21 nt, synthetic construct
  modified_base 1: mod_base = cm
  modified_base 1^2: mod_base = OTHER; note = phosphorothioate linkage
  modified_base 2: mod_base = um
  modified_base 3: mod_base = OTHER; note = 2'-O-methyladenosine
  modified_base 4: mod_base = OTHER; note = 2'-O-methyladenosine
  modified_base 5: mod_base = cm
  modified_base 6: mod_base = cm
  modified_base 7: mod_base = gm
  modified_base 8: mod_base = OTHER; note = 2'-O-methyladenosine
  modified_base 9: mod_base = OTHER; note = 2'-fluoroguanosine
  modified_base 10: mod_base = OTHER; note = 2'-fluoroguanosine
  modified_base 11: mod_base = OTHER; note = 2'-fluorouridine
  modified_base 12: mod_base = cm
  modified_base 13: mod_base = gm
  modified_base 14: mod_base = OTHER; note = 2'-O-methyladenosine
  modified_base 15: mod_base = OTHER; note = 2'-O-methyladenosine
  modified_base 16: mod_base = OTHER; note = 2'-O-methyladenosine
  modified_base 17: mod_base = cm
  modified_base 18: mod_base = gm
  modified_base 19: mod_base = um
  modified_base 20: mod_base = OTHER; note = 2'-O-methyladenosine
  modified_base 21: mod_base = OTHER; note = 2'-O-methyladenosine
  source 1..21: mol_type = other RNA
ctaaccgaggtcgaaacgtaa

SEQ ID NO: 1445 - RNA, 21 nt, synthetic construct
  modified_base 1: mod_base = OTHER; note = 2'-O-methyladenosine
  modified_base 1^2: mod_base = OTHER; note = phosphorothioate linkage
  modified_base 2: mod_base = cm
  modified_base 3: mod_base = gm
  modified_base 4: mod_base = um
  modified_base 5: mod_base = OTHER; note = 2'-O-methyladenosine
  modified_base 6: mod_base = cm
  modified_base 7: mod_base = gm
  modified_base 8: mod_base = um
  modified_base 9: mod_base = OTHER; note = 2'-fluorouridine
  modified_base 10: mod_base = OTHER; note = 2'-fluorocytidine
  modified_base 11: mod_base = OTHER; note = 2'-fluorouridine
  modified_base 12: mod_base = um
  modified_base 13: mod_base = um
  modified_base 14: mod_base = cm
  modified_base 15: mod_base = um
  modified_base 16: mod_base = OTHER; note = 2'-O-methyladenosine
  modified_base 17: mod_base = um
  modified_base 18: mod_base = cm
  modified_base 19: mod_base = OTHER; note = 2'-O-methyladenosine
  modified_base 20: mod_base = um
  modified_base 21: mod_base = OTHER; note = 2'-O-methyladenosine
  source 1..21: mol_type = other RNA
acgtacgttctttctatcata

SEQ ID NO: 1446 - RNA, 21 nt, synthetic construct
  modified_base 1: mod_base = gm
  modified_base 1^2: mod_base = OTHER; note = phosphorothioate linkage
  modified_base 2: mod_base = um
  modified_base 3: mod_base = um
  modified_base 4: mod_base = gm
  modified_base 5: mod_base = OTHER; note = 2'-O-methyladenosine
  modified_base 6: mod_base = cm
  modified_base 7: mod_base = gm
  modified_base 8: mod_base = OTHER; note = 2'-O-methyladenosine
  modified_base 9: mod_base = OTHER; note = 2'-fluorouridine
  modified_base 10: mod_base = OTHER; note = 2'-fluoroguanosine
  modified_base 11: mod_base = OTHER; note = 2'-fluoroguanosine
  modified_base 12: mod_base = um
  modified_base 13: mod_base = cm
  modified_base 14: mod_base = OTHER; note = 2'-O-methyladenosine
  modified_base 15: mod_base = um
  modified_base 16: mod_base = um
  modified_base 17: mod_base = um
  modified_base 18: mod_base = um
  modified_base 19: mod_base = gm
  modified_base 20: mod_base = um
  modified_base 21: mod_base = OTHER; note = 2'-O-methyladenosine
  source 1..21: mol_type = other RNA
gttgacgatggtcattttgta

SEQ ID NO: 1447 - RNA, 21 nt, synthetic construct
  modified_base 1: mod_base = gm
  modified_base 1^2: mod_base = OTHER; note = phosphorothioate linkage
  modified_base 2: mod_base = um
  modified_base 3: mod_base = gm
  modified_base 4: mod_base = OTHER; note = 2'-O-methyladenosine
  modified_base 5: mod_base = cm
  modified_base 6: mod_base = gm
  modified_base 7: mod_base = OTHER; note = 2'-O-methyladenosine
  modified_base 8: mod_base = um
  modified_base 9: mod_base = OTHER; note = 2'-fluoroguanosine
  modified_base 10: mod_base = OTHER; note = 2'-fluoroguanosine
  modified_base 11: mod_base = OTHER; note = 2'-fluorouridine
  modified_base 12: mod_base = cm
  modified_base 13: mod_base = OTHER; note = 2'-O-methyladenosine
  modified_base 14: mod_base = um
  modified_base 15: mod_base = um
  modified_base 16: mod_base = um
  modified_base 17: mod_base = um
  modified_base 18: mod_base = gm
  modified_base 19: mod_base = um
  modified_base 20: mod_base = cm
  modified_base 21: mod_base = OTHER; note = 2'-O-methyladenosine
  source 1..21: mol_type = other RNA
gtgacgatggtcattttgtca

SEQ ID NO: 1448 - RNA, 21 nt, synthetic construct
  modified_base 1: mod_base = cm
  modified_base 1^2: mod_base = OTHER; note = phosphorothioate linkage
  modified_base 2: mod_base = um
  modified_base 3: mod_base = OTHER; note = 2'-O-methyladenosine
  modified_base 4: mod_base = OTHER; note = 2'-O-methyladenosine
  modified_base 5: mod_base = cm
  modified_base 6: mod_base = cm
  modified_base 7: mod_base = gm
  modified_base 8: mod_base = OTHER; note = 2'-O-methyladenosine
  modified_base 9: mod_base = OTHER; note = 2'-fluoroguanosine
  modified_base 10: mod_base = OTHER; note = 2'-fluoroguanosine
  modified_base 11: mod_base = OTHER; note = 2'-fluorouridine
  modified_base 12: mod_base = cm
  modified_base 13: mod_base = gm
  modified_base 14: mod_base = OTHER; note = 2'-O-methyladenosine
  modified_base 15: mod_base = OTHER; note = 2'-O-methyladenosine
  modified_base 16: mod_base = OTHER; note = 2'-O-methyladenosine
  modified_base 17: mod_base = cm
  modified_base 18: mod_base = gm
  modified_base 19: mod_base = um
  modified_base 20: mod_base = OTHER; note = 2'-O-methyladenosine
  modified_base 21: mod_base = OTHER; note = 2'-O-methyladenosine
  source 1..21: mol_type = other RNA
ctaaccgaggtcgaaacgtaa

SEQ ID NO: 1449 - RNA, 21 nt, synthetic construct
  modified_base 1: mod_base = cm
  modified_base 1^2: mod_base = OTHER; note = phosphorothioate linkage
  modified_base 2: mod_base = um
  modified_base 3: mod_base = OTHER; note = 2'-O-methyladenosine
  modified_base 4: mod_base = OTHER; note = 2'-O-methyladenosine
  modified_base 5: mod_base = cm
  modified_base 6: mod_base = cm
  modified_base 7: mod_base = gm
  modified_base 8: mod_base = OTHER; note = 2'-O-methyladenosine
  modified_base 9: mod_base = OTHER; note = 2'-fluoroguanosine
  modified_base 10: mod_base = gm
  modified_base 11: mod_base = OTHER; note = 2'-fluorouridine
  modified_base 12: mod_base = cm
  modified_base 13: mod_base = OTHER; note = 2'-fluoroguanosine
  modified_base 14: mod_base = OTHER; note = 2'-O-methyladenosine
  modified_base 15: mod_base = OTHER; note = 2'-O-methyladenosine
  modified_base 16: mod_base = OTHER; note = 2'-O-methyladenosine
  modified_base 17: mod_base = cm
  modified_base 18: mod_base = gm
  modified_base 19: mod_base = um
  modified_base 20: mod_base = OTHER; note = 2'-O-methyladenosine
  modified_base 21: mod_base = OTHER; note = 2'-O-methyladenosine
  source 1..21: mol_type = other RNA
ctaaccgaggtcgaaacgtaa

SEQ ID NO: 1450 - RNA, 21 nt, synthetic construct
  modified_base 1: mod_base = cm
  modified_base 1^2: mod_base = OTHER; note = phosphorothioate linkage
  modified_base 2: mod_base = um
  modified_base 3: mod_base = OTHER; note = 2'-O-methyladenosine
  modified_base 4: mod_base = OTHER; note = 2'-O-methyladenosine
  modified_base 5: mod_base = cm
  modified_base 6: mod_base = cm
  modified_base 7: mod_base = gm
  modified_base 8: mod_base = OTHER; note = 2'-O-methyladenosine
  modified_base 9: mod_base = OTHER; note = 2'-fluoroguanosine
  modified_base 10: mod_base = gm
  modified_base 11: mod_base = OTHER; note = 2'-fluorouridine
  modified_base 12: mod_base = cm
  modified_base 13: mod_base = gm
  modified_base 14: mod_base = OTHER; note = 2'-O-methyladenosine
  modified_base 15: mod_base = OTHER; note = 2'-O-methyladenosine
  modified_base 16: mod_base = OTHER; note = 2'-O-methyladenosine
  modified_base 17: mod_base = cm
  modified_base 18: mod_base = gm
  modified_base 19: mod_base = um
  modified_base 20: mod_base = OTHER; note = 2'-O-methyladenosine
  modified_base 21: mod_base = OTHER; note = 2'-O-methyladenosine
  source 1..21: mol_type = other RNA
ctaaccgaggtcgaaacgtaa

SEQ ID NO: 1451 - RNA, 21 nt, synthetic construct
  modified_base 1: mod_base = cm
  modified_base 1^2: mod_base = OTHER; note = phosphorothioate linkage
  modified_base 2: mod_base = cm
  modified_base 3: mod_base = cm
  modified_base 4: mod_base = gm
  modified_base 5: mod_base = OTHER; note = 2'-O-methyladenosine
  modified_base 6: mod_base = OTHER; note = 2'-O-methyladenosine
  modified_base 7: mod_base = cm
  modified_base 8: mod_base = OTHER; note = 2'-O-methyladenosine
  modified_base 9: mod_base = OTHER; note = 2'-fluoroadenosine
  modified_base 10: mod_base = OTHER; note = 2'-fluorocytidine
  modified_base 11: mod_base = OTHER; note = 2'-fluoroadenosine
  modified_base 12: mod_base = um
  modified_base 13: mod_base = gm
  modified_base 14: mod_base = gm
  modified_base 15: mod_base = OTHER; note = 2'-O-methyladenosine
  modified_base 16: mod_base = um
  modified_base 17: mod_base = OTHER; note = 2'-O-methyladenosine
  modified_base 18: mod_base = gm
  modified_base 19: mod_base = OTHER; note = 2'-O-methyladenosine
  modified_base 20: mod_base = gm
  modified_base 21: mod_base = OTHER; note = 2'-O-methyladenosine
  source 1..21: mol_type = other RNA
cccgaacaacatggatagaga

SEQ ID NO: 1452 - RNA, 21 nt, synthetic construct
  modified_base 1: mod_base = gm
  modified_base 1^2: mod_base = OTHER; note = phosphorothioate linkage
  modified_base 2: mod_base = OTHER; note = 2'-O-methyladenosine
  modified_base 3: mod_base = cm
  modified_base 4: mod_base = OTHER; note = 2'-O-methyladenosine
  modified_base 5: mod_base = OTHER; note = 2'-O-methyladenosine
  modified_base 6: mod_base = cm
  modified_base 7: mod_base = OTHER; note = 2'-O-methyladenosine
  modified_base 8: mod_base = um
  modified_base 9: mod_base = OTHER; note = 2'-fluoroguanosine
  modified_base 10: mod_base = OTHER; note = 2'-fluoroguanosine
  modified_base 11: mod_base = OTHER; note = 2'-fluoroadenosine
  modified_base 12: mod_base = um
  modified_base 13: mod_base = OTHER; note = 2'-O-methyladenosine
  modified_base 14: mod_base = gm
  modified_base 15: mod_base = OTHER; note = 2'-O-methyladenosine
  modified_base 16: mod_base = OTHER; note = 2 -O-methylinosine
  modified_base 17: mod_base = cm
  modified_base 18: mod_base = OTHER; note = 2'-O-methyladenosine
  modified_base 19: mod_base = gm
  modified_base 20: mod_base = um
  modified_base 21: mod_base = um
  source 1..21: mol_type = other RNA
gacaacatggatagancagtt

SEQ ID NO: 1453 - RNA, 21 nt, synthetic construct
  modified_base 1: mod_base = OTHER; note = 2 -O-methyl-2-aminoadenosine
  modified_base 1^2: mod_base = OTHER; note = phosphorothioate linkage
  modified_base 2: mod_base = cm
  modified_base 3: mod_base = gm
  modified_base 4: mod_base = um
  modified_base 5: mod_base = OTHER; note = 2'-O-methyladenosine
  modified_base 6: mod_base = cm
  modified_base 7: mod_base = gm
  modified_base 8: mod_base = um
  modified_base 9: mod_base = OTHER; note = 2'-fluorouridine
  modified_base 10: mod_base = OTHER; note = 2'-fluorocytidine
  modified_base 11: mod_base = OTHER; note = 2'-fluorouridine
  modified_base 12: mod_base = um
  modified_base 13: mod_base = um
  modified_base 14: mod_base = cm
  modified_base 15: mod_base = um
  modified_base 16: mod_base = OTHER; note = 2'-O-methyladenosine
  modified_base 17: mod_base = um
  modified_base 18: mod_base = cm
  modified_base 19: mod_base = OTHER; note = 2'-O-methyladenosine
  modified_base 20: mod_base = um
  modified_base 21: mod_base = OTHER; note = 2'-O-methyladenosine
  source 1..21: mol_type = other RNA
acgtacgttctttctatcata

SEQ ID NO: 1454 - RNA, 21 nt, synthetic construct
  modified_base 1: mod_base = OTHER; note = 2'-O-methyladenosine
  modified_base 1^2: mod_base = OTHER; note = phosphorothioate linkage
  modified_base 2: mod_base = cm
  modified_base 3: mod_base = gm
  modified_base 4: mod_base = um
  modified_base 5: mod_base = OTHER; note = 2'-O-methyladenosine
  modified_base 6: mod_base = cm
  modified_base 7: mod_base = gm
  modified_base 8: mod_base = um
  modified_base 9: mod_base = OTHER; note = 2'-fluorouridine
  modified_base 10: mod_base = cm
  modified_base 11: mod_base = OTHER; note = 2'-fluorouridine
  modified_base 12: mod_base = um
  modified_base 13: mod_base = OTHER; note = 2'-fluorouridine
  modified_base 14: mod_base = cm
  modified_base 15: mod_base = um
  modified_base 16: mod_base = OTHER; note = 2'-O-methyladenosine
  modified_base 17: mod_base = um
  modified_base 18: mod_base = cm
  modified_base 19: mod_base = OTHER; note = 2'-O-methyladenosine
  modified_base 20: mod_base = um
  modified_base 21: mod_base = OTHER; note = 2'-O-methyladenosine
  source 1..21: mol_type = other RNA
acgtacgttctttctatcata

SEQ ID NO: 1455 - RNA, 21 nt, synthetic construct
  modified_base 1: mod_base = OTHER; note = 2'-O-methyladenosine
  modified_base 1^2: mod_base = OTHER; note = phosphorothioate linkage
  modified_base 2: mod_base = cm
  modified_base 3: mod_base = gm
  modified_base 4: mod_base = um
  modified_base 5: mod_base = OTHER; note = 2'-O-methyladenosine
  modified_base 6: mod_base = cm
  modified_base 7: mod_base = gm
  modified_base 8: mod_base = um
  modified_base 9: mod_base = OTHER; note = 2'-fluorouridine
  modified_base 10: mod_base = cm
  modified_base 11: mod_base = OTHER; note = 2'-fluorouridine
  modified_base 12: mod_base = OTHER; note = 2'-fluorouridine
  modified_base 13: mod_base = um
  modified_base 14: mod_base = cm
  modified_base 15: mod_base = um
  modified_base 16: mod_base = OTHER; note = 2'-O-methyladenosine
  modified_base 17: mod_base = um
  modified_base 18: mod_base = cm
  modified_base 19: mod_base = OTHER; note = 2'-O-methyladenosine
  modified_base 20: mod_base = um
  modified_base 21: mod_base = OTHER; note = 2'-O-methyladenosine
  source 1..21: mol_type = other RNA
acgtacgttctttctatcata

SEQ ID NO: 1456 - RNA, 21 nt, synthetic construct
  modified_base 1: mod_base = gm
  modified_base 1^2: mod_base = OTHER; note = phosphorothioate linkage
  modified_base 2: mod_base = OTHER; note = 2'-O-methyladenosine
  modified_base 3: mod_base = um
  modified_base 4: mod_base = OTHER; note = 2'-O-methyladenosine
  modified_base 5: mod_base = cm
  modified_base 6: mod_base = OTHER; note = 2'-O-methyladenosine
  modified_base 7: mod_base = gm
  modified_base 8: mod_base = OTHER; note = 2'-O-methyladenosine
  modified_base 9: mod_base = OTHER; note = 2'-fluoroguanosine
  modified_base 10: mod_base = OTHER; note = 2'-fluoroadenosine
  modified_base 11: mod_base = OTHER; note = 2'-fluorouridine
  modified_base 12: mod_base = um
  modified_base 13: mod_base = cm
  modified_base 14: mod_base = gm
  modified_base 15: mod_base = cm
  modified_base 16: mod_base = um
  modified_base 17: mod_base = um
  modified_base 18: mod_base = OTHER; note = 2 -O-methylinosine
  modified_base 19: mod_base = gm
  modified_base 20: mod_base = OTHER; note = 2'-O-methyladenosine
  modified_base 21: mod_base = OTHER; note = 2'-O-methyladenosine
  source 1..21: mol_type = other RNA
gatacagagattcgcttngaa

SEQ ID NO: 1457 - RNA, 21 nt, synthetic construct
  modified_base 1: mod_base = OTHER; note = 2'-O-methyladenosine
  modified_base 1^2: mod_base = OTHER; note = phosphorothioate linkage
  modified_base 2: mod_base = gm
  modified_base 3: mod_base = cm
  modified_base 4: mod_base = um
  modified_base 5: mod_base = um
  modified_base 6: mod_base = um
  modified_base 7: mod_base = cm
  modified_base 8: mod_base = um
  modified_base 9: mod_base = OTHER; note = 2'-fluorocytidine
  modified_base 10: mod_base = OTHER; note = 2'-fluoroguanosine
  modified_base 11: mod_base = OTHER; note = 2'-fluorouridine
  modified_base 12: mod_base = um
  modified_base 13: mod_base = um
  modified_base 14: mod_base = cm
  modified_base 15: mod_base = OTHER; note = 2'-O-methyladenosine
  modified_base 16: mod_base = gm
  modified_base 17: mod_base = cm
  modified_base 18: mod_base = um
  modified_base 19: mod_base = um
  modified_base 20: mod_base = OTHER; note = 2'-O-methyladenosine
  modified_base 21: mod_base = um
  source 1..21: mol_type = other RNA
agctttctcgtttcagcttat

SEQ ID NO: 1458 - RNA, 21 nt, synthetic construct
  modified_base 1: mod_base = gm
  modified_base 1^2: mod_base = OTHER; note = phosphorothioate linkage
  modified_base 2: mod_base = cm
  modified_base 3: mod_base = um
  modified_base 4: mod_base = um
  modified_base 5: mod_base = gm
  modified_base 6: mod_base = OTHER; note = 2'-O-methyladenosine
  modified_base 7: mod_base = OTHER; note = 2'-O-methyladenosine
  modified_base 8: mod_base = um
  modified_base 9: mod_base = OTHER; note = 2'-fluoroguanosine
  modified_base 10: mod_base = OTHER; note = 2'-fluoroguanosine
  modified_base 11: mod_base = OTHER; note = 2'-fluoroadenosine
  modified_base 12: mod_base = OTHER; note = 2'-O-methyladenosine
  modified_base 13: mod_base = um
  modified_base 14: mod_base = gm
  modified_base 15: mod_base = gm
  modified_base 16: mod_base = um
  modified_base 17: mod_base = OTHER; note = 2'-O-methyladenosine
  modified_base 18: mod_base = OTHER; note = 2'-O-methyladenosine
  modified_base 19: mod_base = cm
  modified_base 20: mod_base = OTHER; note = 2'-O-methyladenosine
  modified_base 21: mod_base = OTHER; note = 2'-O-methyladenosine
  source 1..21: mol_type = other RNA
gcttgaatggaatggtaacaa

SEQ ID NO: 1459 - RNA, 21 nt, synthetic construct
  modified_base 1: mod_base = gm
  modified_base 1^2: mod_base = OTHER; note = phosphorothioate linkage
  modified_base 2: mod_base = cm
  modified_base 3: mod_base = gm
  modified_base 4: mod_base = OTHER; note = 2'-O-methyladenosine
  modified_base 5: mod_base = cm
  modified_base 6: mod_base = OTHER; note = 2'-O-methyladenosine
  modified_base 7: mod_base = gm
  modified_base 8: mod_base = OTHER; note = 2'-O-methyladenosine
  modified_base 9: mod_base = OTHER; note = 2'-fluoroguanosine
  modified_base 10: mod_base = OTHER; note = 2'-fluoroadenosine
  modified_base 11: mod_base = OTHER; note = 2'-fluoroadenosine
  modified_base 12: mod_base = um
  modified_base 13: mod_base = OTHER; note = 2'-O-methyladenosine
  modified_base 14: mod_base = gm
  modified_base 15: mod_base = um
  modified_base 16: mod_base = um
  modified_base 17: mod_base = um
  modified_base 18: mod_base = cm
  modified_base 19: mod_base = gm
  modified_base 20: mod_base = OTHER; note = 2'-O-methyladenosine
  modified_base 21: mod_base = OTHER; note = 2'-O-methyladenosine
  source 1..21: mol_type = other RNA
gcgacagagaatagtttcgaa

SEQ ID NO: 1460 - RNA, 21 nt, synthetic construct
  modified_base 1: mod_base = gm
  modified_base 1^2: mod_base = OTHER; note = phosphorothioate linkage
  modified_base 2: mod_base = OTHER; note = 2'-O-methyladenosine
  modified_base 3: mod_base = um
  modified_base 4: mod_base = gm
  modified_base 5: mod_base = OTHER; note = 2'-O-methyladenosine
  modified_base 6: mod_base = gm
  modified_base 7: mod_base = gm
  modified_base 8: mod_base = OTHER; note = 2'-O-methyladenosine
  modified_base 9: mod_base = OTHER; note = 2'-fluorouridine
  modified_base 10: mod_base = OTHER; note = 2'-fluoroguanosine
  modified_base 11: mod_base = OTHER; note = 2'-fluorouridine
  modified_base 12: mod_base = cm
  modified_base 13: mod_base = OTHER; note = 2'-O-methyladenosine
  modified_base 14: mod_base = OTHER; note = 2'-O-methyladenosine
  modified_base 15: mod_base = OTHER; note = 2'-O-methyladenosine
  modified_base 16: mod_base = OTHER; note = 2'-O-methyladenosine
  modified_base 17: mod_base = OTHER; note = 2'-O-methyladenosine
  modified_base 18: mod_base = um
  modified_base 19: mod_base = gm
  modified_base 20: mod_base = cm
  modified_base 21: mod_base = OTHER; note = 2'-O-methyladenosine
  source 1..21: mol_type = other RNA
gatgaggatgtcaaaaatgca

SEQ ID NO: 1461 - RNA, 21 nt, synthetic construct
  modified_base 1: mod_base = gm
  modified_base 1^2: mod_base = OTHER; note = phosphorothioate linkage
  modified_base 2: mod_base = OTHER; note = 2'-O-methyladenosine
  modified_base 3: mod_base = um
  modified_base 4: mod_base = gm
  modified_base 5: mod_base = OTHER; note = 2'-O-methyladenosine
  modified_base 6: mod_base = gm
  modified_base 7: mod_base = gm
  modified_base 8: mod_base = OTHER; note = 2'-O-methyladenosine
  modified_base 9: mod_base = OTHER; note = 2'-fluorouridine
  modified_base 10: mod_base = gm
  modified_base 11: mod_base = OTHER; note = 2'-fluorouridine
  modified_base 12: mod_base = cm
  modified_base 13: mod_base = OTHER; note = 2'-fluoroadenosine
  modified_base 14: mod_base = OTHER; note = 2'-O-methyladenosine
  modified_base 15: mod_base = OTHER; note = 2'-O-methyladenosine
  modified_base 16: mod_base = OTHER; note = 2'-O-methyladenosine
  modified_base 17: mod_base = OTHER; note = 2'-O-methyladenosine
  modified_base 18: mod_base = um
  modified_base 19: mod_base = gm
  modified_base 20: mod_base = cm
  modified_base 21: mod_base = OTHER; note = 2'-O-methyladenosine
  source 1..21: mol_type = other RNA
gatgaggatgtcaaaaatgca

SEQ ID NO: 1462 - RNA, 21 nt, synthetic construct
  modified_base 1: mod_base = gm
  modified_base 1^2: mod_base = OTHER; note = phosphorothioate linkage
  modified_base 2: mod_base = um
  modified_base 3: mod_base = gm
  modified_base 4: mod_base = OTHER; note = 2'-O-methyladenosine
  modified_base 5: mod_base = um
  modified_base 6: mod_base = gm
  modified_base 7: mod_base = cm
  modified_base 8: mod_base = cm
  modified_base 9: mod_base = OTHER; note = 2'-fluorocytidine
  modified_base 10: mod_base = OTHER; note = 2'-fluorocytidine
  modified_base 11: mod_base = OTHER; note = 2'-fluoroadenosine
  modified_base 12: mod_base = um
  modified_base 13: mod_base = um
  modified_base 14: mod_base = cm
  modified_base 15: mod_base = cm
  modified_base 16: mod_base = um
  modified_base 17: mod_base = um
  modified_base 18: mod_base = gm
  modified_base 19: mod_base = OTHER; note = 2'-O-methyladenosine
  modified_base 20: mod_base = um
  modified_base 21: mod_base = OTHER; note = 2'-O-methyladenosine
  source 1..21: mol_type = other RNA
gtgatgccccattccttgata

SEQ ID NO: 1463 - RNA, 21 nt, synthetic construct
  modified_base 1: mod_base = um
  modified_base 1^2: mod_base = OTHER; note = phosphorothioate linkage
  modified_base 2: mod_base = gm
  modified_base 3: mod_base = OTHER; note = 2'-O-methyladenosine
  modified_base 4: mod_base = um
  modified_base 5: mod_base = gm
  modified_base 6: mod_base = cm
  modified_base 7: mod_base = cm
  modified_base 8: mod_base = cm
  modified_base 9: mod_base = OTHER; note = 2'-fluorocytidine
  modified_base 10: mod_base = OTHER; note = 2'-fluoroadenosine
  modified_base 11: mod_base = OTHER; note = 2'-fluorouridine
  modified_base 12: mod_base = um
  modified_base 13: mod_base = cm
  modified_base 14: mod_base = cm
  modified_base 15: mod_base = um
  modified_base 16: mod_base = um
  modified_base 17: mod_base = gm
  modified_base 18: mod_base = OTHER; note = 2'-O-methyladenosine
  modified_base 19: mod_base = um
  modified_base 20: mod_base = cm
  modified_base 21: mod_base = OTHER; note = 2'-O-methyladenosine
  source 1..21: mol_type = other RNA
tgatgccccattccttgatca

SEQ ID NO: 1464 - RNA, 21 nt, synthetic construct
  modified_base 1: mod_base = gm
  modified_base 1^2: mod_base = OTHER; note = phosphorothioate linkage
  modified_base 2: mod_base = OTHER; note = 2'-O-methyladenosine
  modified_base 3: mod_base = um
  modified_base 4: mod_base = gm
  modified_base 5: mod_base = cm
  modified_base 6: mod_base = cm
  modified_base 7: mod_base = cm
  modified_base 8: mod_base = cm
  modified_base 9: mod_base = OTHER; note = 2'-fluoroadenosine
  modified_base 10: mod_base = OTHER; note = 2'-fluorouridine
  modified_base 11: mod_base = OTHER; note = 2'-fluorouridine
  modified_base 12: mod_base = cm
  modified_base 13: mod_base = cm
  modified_base 14: mod_base = um
  modified_base 15: mod_base = um
  modified_base 16: mod_base = OTHER; note = 2 -O-methylinosine
  modified_base 17: mod_base = OTHER; note = 2'-O-methyladenosine
  modified_base 18: mod_base = um
  modified_base 19: mod_base = cm
  modified_base 20: mod_base = gm
  modified_base 21: mod_base = OTHER; note = 2'-O-methyladenosine
  source 1..21: mol_type = other RNA
gatgccccattccttnatcga

SEQ ID NO: 1465 - RNA, 21 nt, synthetic construct
  modified_base 1: mod_base = cm
  modified_base 1^2: mod_base = OTHER; note = phosphorothioate linkage
  modified_base 2: mod_base = um
  modified_base 3: mod_base = cm
  modified_base 4: mod_base = OTHER; note = 2'-O-methyladenosine
  modified_base 5: mod_base = um
  modified_base 6: mod_base = cm
  modified_base 7: mod_base = gm
  modified_base 8: mod_base = gm
  modified_base 9: mod_base = OTHER; note = 2'-fluoroadenosine
  modified_base 10: mod_base = OTHER; note = 2'-fluoroguanosine
  modified_base 11: mod_base = OTHER; note = 2'-fluoroguanosine
  modified_base 12: mod_base = OTHER; note = 2'-O-methyladenosine
  modified_base 13: mod_base = cm
  modified_base 14: mod_base = um
  modified_base 15: mod_base = um
  modified_base 16: mod_base = gm
  modified_base 17: mod_base = OTHER; note = 2'-O-methyladenosine
  modified_base 18: mod_base = OTHER; note = 2'-O-methyladenosine
  modified_base 19: mod_base = um
  modified_base 20: mod_base = gm
  modified_base 21: mod_base = OTHER; note = 2'-O-methyladenosine
  source 1..21: mol_type = other RNA
ctcatcggaggacttgaatga

SEQ ID NO: 1466 - RNA, 21 nt, synthetic construct
  modified_base 1: mod_base = um
  modified_base 1^2: mod_base = OTHER; note = phosphorothioate linkage
  modified_base 2: mod_base = cm
  modified_base 3: mod_base = OTHER; note = 2'-O-methyladenosine
  modified_base 4: mod_base = um
  modified_base 5: mod_base = cm
  modified_base 6: mod_base = gm
  modified_base 7: mod_base = gm
  modified_base 8: mod_base = OTHER; note = 2'-O-methyladenosine
  modified_base 9: mod_base = OTHER; note = 2'-fluoroguanosine
  modified_base 10: mod_base = OTHER; note = 2'-fluoroguanosine
  modified_base 11: mod_base = OTHER; note = 2'-fluoroadenosine
  modified_base 12: mod_base = cm
  modified_base 13: mod_base = um
  modified_base 14: mod_base = um
  modified_base 15: mod_base = gm
  modified_base 16: mod_base = OTHER; note = 2'-O-methyladenosine
  modified_base 17: mod_base = OTHER; note = 2'-O-methyladenosine
  modified_base 18: mod_base = um
  modified_base 19: mod_base = OTHER; note = 2 -O-methylinosine
  modified_base 20: mod_base = gm
  modified_base 21: mod_base = OTHER; note = 2'-O-methyladenosine
  source 1..21: mol_type = other RNA
tcatcggaggacttgaatnga

SEQ ID NO: 1467 - RNA, 21 nt, synthetic construct
  modified_base 1: mod_base = cm
  modified_base 1^2: mod_base = OTHER; note = phosphorothioate linkage
  modified_base 2: mod_base = OTHER; note = 2'-O-methyladenosine
  modified_base 3: mod_base = um
  modified_base 4: mod_base = cm
  modified_base 5: mod_base = gm
  modified_base 6: mod_base = gm
  modified_base 7: mod_base = OTHER; note = 2'-O-methyladenosine
  modified_base 8: mod_base = gm
  modified_base 9: mod_base = OTHER; note = 2'-fluoroguanosine
  modified_base 10: mod_base = OTHER; note = 2'-fluoroadenosine
  modified_base 11: mod_base = OTHER; note = 2'-fluorocytidine
  modified_base 12: mod_base = um
  modified_base 13: mod_base = um
  modified_base 14: mod_base = gm
  modified_base 15: mod_base = OTHER; note = 2'-O-methyladenosine
  modified_base 16: mod_base = OTHER; note = 2'-O-methyladenosine
  modified_base 17: mod_base = um
  modified_base 18: mod_base = gm
  modified_base 19: mod_base = gm
  modified_base 20: mod_base = OTHER; note = 2'-O-methyladenosine
  modified_base 21: mod_base = OTHER; note = 2'-O-methyladenosine
  source 1..21: mol_type = other RNA
catcggaggacttgaatggaa

SEQ ID NO: 1468 - RNA, 21 nt, synthetic construct
  modified_base 1: mod_base = um
  modified_base 1^2: mod_base = OTHER; note = phosphorothioate linkage
  modified_base 2: mod_base = cm
  modified_base 3: mod_base = gm
  modified_base 4: mod_base = gm
  modified_base 5: mod_base = OTHER; note = 2'-O-methyladenosine
  modified_base 6: mod_base = gm
  modified_base 7: mod_base = gm
  modified_base 8: mod_base = OTHER; note = 2'-O-methyladenosine
  modified_base 9: mod_base = OTHER; note = 2'-fluorocytidine
  modified_base 10: mod_base = OTHER; note = 2'-fluorouridine
  modified_base 11: mod_base = OTHER; note = 2'-fluorouridine
  modified_base 12: mod_base = gm
  modified_base 13: mod_base = OTHER; note = 2'-O-methyladenosine
  modified_base 14: mod_base = OTHER; note = 2'-O-methyladenosine
  modified_base 15: mod_base = um
  modified_base 16: mod_base = gm
  modified_base 17: mod_base = gm
  modified_base 18: mod_base = OTHER; note = 2'-O-methyladenosine
  modified_base 19: mod_base = OTHER; note = 2'-O-methyladenosine
  modified_base 20: mod_base = um
  modified_base 21: mod_base = OTHER; note = 2'-O-methyladenosine
  source 1..21: mol_type = other RNA
tcggaggacttgaatggaata

SEQ ID NO: 1469 - RNA, 21 nt, synthetic construct
  modified_base 1: mod_base = cm
  modified_base 1^2: mod_base = OTHER; note = phosphorothioate linkage
  modified_base 2: mod_base = gm
  modified_base 3: mod_base = gm
  modified_base 4: mod_base = OTHER; note = 2'-O-methyladenosine
  modified_base 5: mod_base = gm
  modified_base 6: mod_base = gm
  modified_base 7: mod_base = OTHER; note = 2'-O-methyladenosine
  modified_base 8: mod_base = cm
  modified_base 9: mod_base = OTHER; note = 2'-fluorouridine
  modified_base 10: mod_base = OTHER; note = 2'-fluorouridine
  modified_base 11: mod_base = OTHER; note = 2'-fluoroguanosine
  modified_base 12: mod_base = OTHER; note = 2'-O-methyladenosine
  modified_base 13: mod_base = OTHER; note = 2'-O-methyladenosine
  modified_base 14: mod_base = um
  modified_base 15: mod_base = gm
  modified_base 16: mod_base = OTHER; note = 2 -O-methylinosine
  modified_base 17: mod_base = OTHER; note = 2'-O-methyladenosine
  modified_base 18: mod_base = OTHER; note = 2'-O-methyladenosine
  modified_base 19: mod_base = um
  modified_base 20: mod_base = gm
  modified_base 21: mod_base = OTHER; note = 2'-O-methyladenosine
  source 1..21: mol_type = other RNA
cggaggacttgaatgnaatga

SEQ ID NO: 1470 - RNA, 21 nt, synthetic construct
  modified_base 1: mod_base = OTHER; note = 2'-O-methyladenosine
  modified_base 1^2: mod_base = OTHER; note = phosphorothioate linkage
  modified_base 2: mod_base = cm
  modified_base 3: mod_base = um
  modified_base 4: mod_base = gm
  modified_base 5: mod_base = OTHER; note = 2'-O-methyladenosine
  modified_base 6: mod_base = OTHER; note = 2'-O-methyladenosine
  modified_base 7: mod_base = OTHER; note = 2'-O-methyladenosine
  modified_base 8: mod_base = gm
  modified_base 9: mod_base = OTHER; note = 2'-fluorocytidine
  modified_base 10: mod_base = OTHER; note = 2'-fluoroguanosine
  modified_base 11: mod_base = OTHER; note = 2'-fluoroadenosine
  modified_base 12: mod_base = OTHER; note = 2'-O-methyladenosine
  modified_base 13: mod_base = cm
  modified_base 14: mod_base = um
  modified_base 15: mod_base = um
  modified_base 16: mod_base = cm
  modified_base 17: mod_base = OTHER; note = 2'-O-methyladenosine
  modified_base 18: mod_base = OTHER; note = 2 -O-methylinosine
  modified_base 19: mod_base = um
  modified_base 20: mod_base = gm
  modified_base 21: mod_base = um
  source 1..21: mol_type = other RNA
actgaaagcgaacttcantgt

SEQ ID NO: 1471 - RNA, 21 nt, synthetic construct
  modified_base 1: mod_base = cm
  modified_base 1^2: mod_base = OTHER; note = phosphorothioate linkage
  modified_base 2: mod_base = um
  modified_base 3: mod_base = um
  modified_base 4: mod_base = cm
  modified_base 5: mod_base = um
  modified_base 6: mod_base = cm
  modified_base 7: mod_base = um
  modified_base 8: mod_base = um
  modified_base 9: mod_base = OTHER; note = 2'-fluorocytidine
  modified_base 10: mod_base = OTHER; note = 2'-fluorocytidine
  modified_base 11: mod_base = OTHER; note = 2'-fluoroadenosine
  modified_base 12: mod_base = gm
  modified_base 13: mod_base = gm
  modified_base 14: mod_base = OTHER; note = 2'-O-methyladenosine
  modified_base 15: mod_base = cm
  modified_base 16: mod_base = OTHER; note = 2'-O-methyladenosine
  modified_base 17: mod_base = um
  modified_base 18: mod_base = OTHER; note = 2'-O-methyladenosine
  modified_base 19: mod_base = cm
  modified_base 20: mod_base = um
  modified_base 21: mod_base = um
  source 1..21: mol_type = other RNA
cttctcttccaggacatactt

SEQ ID NO: 1472 - RNA, 21 nt, synthetic construct
  modified_base 1: mod_base = gm
  modified_base 1^2: mod_base = OTHER; note = phosphorothioate linkage
  modified_base 2: mod_base = OTHER; note = 2'-O-methyladenosine
  modified_base 3: mod_base = um
  modified_base 4: mod_base = gm
  modified_base 5: mod_base = um
  modified_base 6: mod_base = cm
  modified_base 7: mod_base = OTHER; note = 2'-O-methyladenosine
  modified_base 8: mod_base = OTHER; note = 2'-O-methyladenosine
  modified_base 9: mod_base = OTHER; note = 2'-fluoroadenosine
  modified_base 10: mod_base = OTHER; note = 2'-fluoroadenosine
  modified_base 11: mod_base = OTHER; note = 2'-fluoroadenosine
  modified_base 12: mod_base = um
  modified_base 13: mod_base = gm
  modified_base 14: mod_base = cm
  modified_base 15: mod_base = OTHER; note = 2'-O-methyladenosine
  modified_base 16: mod_base = OTHER; note = 2 -O-methylinosine
  modified_base 17: mod_base = um
  modified_base 18: mod_base = um
  modified_base 19: mod_base = gm
  modified_base 20: mod_base = gm
  modified_base 21: mod_base = OTHER; note = 2'-O-methyladenosine
  source 1..21: mol_type = other RNA
gatgtcaaaaatgcanttgga

SEQ ID NO: 1473 - RNA, 21 nt, synthetic construct
  modified_base 1: mod_base = gm
  modified_base 1^2: mod_base = OTHER; note = phosphorothioate linkage
  modified_base 2: mod_base = um
  modified_base 3: mod_base = gm
  modified_base 4: mod_base = OTHER; note = 2'-O-methyladenosine
  modified_base 5: mod_base = um
  modified_base 6: mod_base = gm
  modified_base 7: mod_base = OTHER; note = 2'-O-methyladenosine
  modified_base 8: mod_base = gm
  modified_base 9: mod_base = OTHER; note = 2'-fluoroadenosine
  modified_base 10: mod_base = OTHER; note = 2'-fluoroadenosine
  modified_base 11: mod_base = OTHER; note = 2'-fluorouridine
  modified_base 12: mod_base = gm
  modified_base 13: mod_base = gm
  modified_base 14: mod_base = gm
  modified_base 15: mod_base = OTHER; note = 2'-O-methyladenosine
  modified_base 16: mod_base = OTHER; note = 2 -O-methylinosine
  modified_base 17: mod_base = OTHER; note = 2'-O-methyladenosine
  modified_base 18: mod_base = cm
  modified_base 19: mod_base = cm
  modified_base 20: mod_base = um
  modified_base 21: mod_base = um
  source 1..21: mol_type = other RNA
gtgatgagaatggganacctt

SEQ ID NO: 1474 - RNA, 21 nt, synthetic construct
  modified_base 1: mod_base = gm
  modified_base 1^2: mod_base = OTHER; note = phosphorothioate linkage
  modified_base 2: mod_base = OTHER; note = 2'-O-methyladenosine
  modified_base 3: mod_base = um
  modified_base 4: mod_base = cm
  modified_base 5: mod_base = um
  modified_base 6: mod_base = um
  modified_base 7: mod_base = gm
  modified_base 8: mod_base = OTHER; note = 2'-O-methyladenosine
  modified_base 9: mod_base = OTHER; note = 2'-fluoroadenosine
  modified_base 10: mod_base = OTHER; note = 2'-fluoroadenosine
  modified_base 11: mod_base = OTHER; note = 2'-fluoroguanosine
  modified_base 12: mod_base = OTHER; note = 2'-O-methyladenosine
  modified_base 13: mod_base = gm
  modified_base 14: mod_base = gm
  modified_base 15: mod_base = OTHER; note = 2'-O-methyladenosine
  modified_base 16: mod_base = OTHER; note = 2'-O-methyladenosine
  modified_base 17: mod_base = um
  modified_base 18: mod_base = cm
  modified_base 19: mod_base = cm
  modified_base 20: mod_base = OTHER; note = 2'-O-methyladenosine
  modified_base 21: mod_base = OTHER; note = 2'-O-methyladenosine
  source 1..21: mol_type = other RNA
gatcttgaaagaggaatccaa

SEQ ID NO: 1475 - RNA, 21 nt, synthetic construct
  modified_base 1: mod_base = OTHER; note = 2'-O-methyladenosine
  modified_base 1^2: mod_base = OTHER; note = phosphorothioate linkage
  modified_base 2: mod_base = cm
  modified_base 3: mod_base = gm
  modified_base 4: mod_base = OTHER; note = 2'-O-methyladenosine
  modified_base 5: mod_base = gm
  modified_base 6: mod_base = OTHER; note = 2'-O-methyladenosine
  modified_base 7: mod_base = cm
  modified_base 8: mod_base = um
  modified_base 9: mod_base = OTHER; note = 2'-fluoroguanosine
  modified_base 10: mod_base = OTHER; note = 2'-fluoroguanosine
  modified_base 11: mod_base = OTHER; note = 2'-fluorouridine
  modified_base 12: mod_base = um
  modified_base 13: mod_base = cm
  modified_base 14: mod_base = OTHER; note = 2'-O-methyladenosine
  modified_base 15: mod_base = um
  modified_base 16: mod_base = OTHER; note = 2 -O-methylinosine
  modified_base 17: mod_base = cm
  modified_base 18: mod_base = um
  modified_base 19: mod_base = cm
  modified_base 20: mod_base = OTHER; note = 2'-O-methyladenosine
  modified_base 21: mod_base = um
  source 1..21: mol_type = other RNA
acgagactggttcatnctcat

SEQ ID NO: 1476 - RNA, 21 nt, synthetic construct
  modified_base 1: mod_base = gm
  modified_base 1^2: mod_base = OTHER; note = phosphorothioate linkage
  modified_base 2: mod_base = cm
  modified_base 3: mod_base = gm
  modified_base 4: mod_base = OTHER; note = 2'-O-methyladenosine
  modified_base 5: mod_base = OTHER; note = 2'-O-methyladenosine
  modified_base 6: mod_base = cm
  modified_base 7: mod_base = um
  modified_base 8: mod_base = um
  modified_base 9: mod_base = OTHER; note = 2'-fluorocytidine
  modified_base 10: mod_base = OTHER; note = 2'-fluoroadenosine
  modified_base 11: mod_base = OTHER; note = 2'-fluoroguanosine
  modified_base 12: mod_base = um
  modified_base 13: mod_base = gm
  modified_base 14: mod_base = um
  modified_base 15: mod_base = OTHER; note = 2'-O-methyladenosine
  modified_base 16: mod_base = OTHER; note = 2'-O-methyladenosine
  modified_base 17: mod_base = um
  modified_base 18: mod_base = cm
  modified_base 19: mod_base = um
  modified_base 20: mod_base = um
  modified_base 21: mod_base = um
  source 1..21: mol_type = other RNA
gcgaacttcagtgtaatcttt

SEQ ID NO: 1477 - RNA, 21 nt, synthetic construct
  modified_base 1: mod_base = OTHER; note = 2'-O-methyladenosine
  modified_base 1^2: mod_base = OTHER; note = phosphorothioate linkage
  modified_base 2: mod_base = cm
  modified_base 3: mod_base = cm
  modified_base 4: mod_base = gm
  modified_base 5: mod_base = OTHER; note = 2'-O-methyladenosine
  modified_base 6: mod_base = um
  modified_base 7: mod_base = um
  modified_base 8: mod_base = OTHER; note = 2'-O-methyladenosine
  modified_base 9: mod_base = OTHER; note = 2'-fluoroguanosine
  modified_base 10: mod_base = OTHER; note = 2'-fluoroadenosine
  modified_base 11: mod_base = OTHER; note = 2'-fluoroguanosine
  modified_base 12: mod_base = OTHER; note = 2'-O-methyladenosine
  modified_base 13: mod_base = cm
  modified_base 14: mod_base = cm
  modified_base 15: mod_base = um
  modified_base 16: mod_base = um
  modified_base 17: mod_base = gm
  modified_base 18: mod_base = OTHER; note = 2'-O-methyladenosine
  modified_base 19: mod_base = um
  modified_base 20: mod_base = OTHER; note = 2'-O-methyladenosine
  modified_base 21: mod_base = OTHER; note = 2'-O-methyladenosine
  source 1..21: mol_type = other RNA
accgattagagaccttgataa

SEQ ID NO: 1478 - RNA, 21 nt, synthetic construct
  modified_base 1: mod_base = gm
  modified_base 1^2: mod_base = OTHER; note = phosphorothioate linkage
  modified_base 2: mod_base = um
  modified_base 3: mod_base = OTHER; note = 2'-O-methyladenosine
  modified_base 4: mod_base = cm
  modified_base 5: mod_base = um
  modified_base 6: mod_base = OTHER; note = 2'-O-methyladenosine
  modified_base 7: mod_base = cm
  modified_base 8: mod_base = um
  modified_base 9: mod_base = OTHER; note = 2'-fluoroadenosine
  modified_base 10: mod_base = OTHER; note = 2'-fluoroadenosine
  modified_base 11: mod_base = OTHER; note = 2'-fluoroguanosine
  modified_base 12: mod_base = gm
  modified_base 13: mod_base = gm
  modified_base 14: mod_base = cm
  modified_base 15: mod_base = um
  modified_base 16: mod_base = um
  modified_base 17: mod_base = um
  modified_base 18: mod_base = cm
  modified_base 19: mod_base = OTHER; note = 2'-O-methyladenosine
  modified_base 20: mod_base = cm
  modified_base 21: mod_base = um
  source 1..21: mol_type = other RNA
gtactactaagggctttcact

SEQ ID NO: 1479 - RNA, 21 nt, synthetic construct
  modified_base 1: mod_base = gm
  modified_base 1^2: mod_base = OTHER; note = phosphorothioate linkage
  modified_base 2: mod_base = OTHER; note = 2'-O-methyladenosine
  modified_base 3: mod_base = OTHER; note = 2'-O-methyladenosine
  modified_base 4: mod_base = um
  modified_base 5: mod_base = gm
  modified_base 6: mod_base = gm
  modified_base 7: mod_base = um
  modified_base 8: mod_base = OTHER; note = 2'-O-methyladenosine
  modified_base 9: mod_base = OTHER; note = 2'-fluoroadenosine
  modified_base 10: mod_base = OTHER; note = 2'-fluorocytidine
  modified_base 11: mod_base = OTHER; note = 2'-fluoroadenosine
  modified_base 12: mod_base = cm
  modified_base 13: mod_base = gm
  modified_base 14: mod_base = gm
  modified_base 15: mod_base = um
  modified_base 16: mod_base = um
  modified_base 17: mod_base = cm
  modified_base 18: mod_base = OTHER; note = 2 -O-methylinosine
  modified_base 19: mod_base = OTHER; note = 2'-O-methyladenosine
  modified_base 20: mod_base = gm
  modified_base 21: mod_base = um
  source 1..21: mol_type = other RNA
gaatggtaacacggttcnagt

SEQ ID NO: 1480 - RNA, 21 nt, synthetic construct
  modified_base 1: mod_base = um
  modified_base 1^2: mod_base = OTHER; note = phosphorothioate linkage
  modified_base 2: mod_base = gm
  modified_base 3: mod_base = gm
  modified_base 4: mod_base = um
  modified_base 5: mod_base = OTHER; note = 2'-O-methyladenosine
  modified_base 6: mod_base = OTHER; note = 2'-O-methyladenosine
  modified_base 7: mod_base = cm
  modified_base 8: mod_base = OTHER; note = 2'-O-methyladenosine
  modified_base 9: mod_base = OTHER; note = 2'-fluorocytidine
  modified_base 10: mod_base = OTHER; note = 2'-fluoroguanosine
  modified_base 11: mod_base = OTHER; note = 2'-fluoroguanosine
  modified_base 12: mod_base = um
  modified_base 13: mod_base = um
  modified_base 14: mod_base = cm
  modified_base 15: mod_base = gm
  modified_base 16: mod_base = OTHER; note = 2'-O-methyladenosine
  modified_base 17: mod_base = OTHER; note = 2 -O-methylinosine
  modified_base 18: mod_base = um
  modified_base 19: mod_base = cm
  modified_base 20: mod_base = um
  modified_base 21: mod_base = OTHER; note = 2'-O-methyladenosine
  source 1..21: mol_type = other RNA
tggtaacacggttcgantcta

SEQ ID NO: 1481 - RNA, 21 nt, synthetic construct
  modified_base 1: mod_base = gm
  modified_base 1^2: mod_base = OTHER; note = phosphorothioate linkage
  modified_base 2: mod_base = um
  modified_base 3: mod_base = um
  modified_base 4: mod_base = OTHER; note = 2'-O-methyladenosine
  modified_base 5: mod_base = um
  modified_base 6: mod_base = gm
  modified_base 7: mod_base = cm
  modified_base 8: mod_base = OTHER; note = 2'-O-methyladenosine
  modified_base 9: mod_base = OTHER; note = 2'-fluoroadenosine
  modified_base 10: mod_base = OTHER; note = 2'-fluoroguanosine
  modified_base 11: mod_base = OTHER; note = 2'-fluorocytidine
  modified_base 12: mod_base = cm
  modified_base 13: mod_base = um
  modified_base 14: mod_base = um
  modified_base 15: mod_base = OTHER; note = 2'-O-methyladenosine
  modified_base 16: mod_base = cm
  modified_base 17: mod_base = OTHER; note = 2'-O-methyladenosine
  modified_base 18: mod_base = OTHER; note = 2'-O-methyladenosine
  modified_base 19: mod_base = cm
  modified_base 20: mod_base = um
  modified_base 21: mod_base = OTHER; note = 2'-O-methyladenosine
  source 1..21: mol_type = other RNA
gttatgcaagccttacaacta

SEQ ID NO: 1482 - RNA, 21 nt, synthetic construct
  modified_base 1: mod_base = gm
  modified_base 1^2: mod_base = OTHER; note = phosphorothioate linkage
  modified_base 2: mod_base = gm
  modified_base 3: mod_base = OTHER; note = 2'-O-methyladenosine
  modified_base 4: mod_base = gm
  modified_base 5: mod_base = OTHER; note = 2'-O-methyladenosine
  modified_base 6: mod_base = um
  modified_base 7: mod_base = OTHER; note = 2'-O-methyladenosine
  modified_base 8: mod_base = OTHER; note = 2'-O-methyladenosine
  modified_base 9: mod_base = OTHER; note = 2'-fluoroguanosine
  modified_base 10: mod_base = OTHER; note = 2'-fluoroadenosine
  modified_base 11: mod_base = OTHER; note = 2'-fluoroguanosine
  modified_base 12: mod_base = cm
  modified_base 13: mod_base = um
  modified_base 14: mod_base = um
  modified_base 15: mod_base = um
  modified_base 16: mod_base = cm
  modified_base 17: mod_base = um
  modified_base 18: mod_base = cm
  modified_base 19: mod_base = OTHER; note = 2 -O-methylinosine
  modified_base 20: mod_base = um
  modified_base 21: mod_base = um
  source 1..21: mol_type = other RNA
ggagataagagctttctcntt

SEQ ID NO: 1483 - RNA, 21 nt, synthetic construct
  modified_base 1: mod_base = um
  modified_base 1^2: mod_base = OTHER; note = phosphorothioate linkage
  modified_base 2: mod_base = cm
  modified_base 3: mod_base = OTHER; note = 2'-O-methyladenosine
  modified_base 4: mod_base = um
  modified_base 5: mod_base = gm
  modified_base 6: mod_base = cm
  modified_base 7: mod_base = cm
  modified_base 8: mod_base = um
  modified_base 9: mod_base = OTHER; note = 2'-fluorouridine
  modified_base 10: mod_base = OTHER; note = 2'-fluoroguanosine
  modified_base 11: mod_base = OTHER; note = 2'-fluoroadenosine
  modified_base 12: mod_base = OTHER; note = 2'-O-methyladenosine
  modified_base 13: mod_base = OTHER; note = 2'-O-methyladenosine
  modified_base 14: mod_base = cm
  modified_base 15: mod_base = OTHER; note = 2'-O-methyladenosine
  modified_base 16: mod_base = OTHER; note = 2'-O-methyladenosine
  modified_base 17: mod_base = um
  modified_base 18: mod_base = gm
  modified_base 19: mod_base = gm
  modified_base 20: mod_base = OTHER; note = 2'-O-methyladenosine
  modified_base 21: mod_base = OTHER; note = 2'-O-methyladenosine
  source 1..21: mol_type = other RNA
tcatgccttgaaacaatggaa

SEQ ID NO: 1484 - RNA, 21 nt, synthetic construct
  modified_base 1: mod_base = um
  modified_base 1^2: mod_base = OTHER; note = phosphorothioate linkage
  modified_base 2: mod_base = gm
  modified_base 3: mod_base = cm
  modified_base 4: mod_base = gm
  modified_base 5: mod_base = OTHER; note = 2'-O-methyladenosine
  modified_base 6: mod_base = OTHER; note = 2'-O-methyladenosine
  modified_base 7: mod_base = OTHER; note = 2'-O-methyladenosine
  modified_base 8: mod_base = OTHER; note = 2'-O-methyladenosine
  modified_base 9: mod_base = OTHER; note = 2'-fluoroguanosine
  modified_base 10: mod_base = OTHER; note = 2'-fluorocytidine
  modified_base 11: mod_base = OTHER; note = 2'-fluorouridine
  modified_base 12: mod_base = um
  modified_base 13: mod_base = gm
  modified_base 14: mod_base = OTHER; note = 2'-O-methyladenosine
  modified_base 15: mod_base = OTHER; note = 2'-O-methyladenosine
  modified_base 16: mod_base = cm
  modified_base 17: mod_base = OTHER; note = 2'-O-methyladenosine
  modified_base 18: mod_base = OTHER; note = 2 -O-methylinosine
  modified_base 19: mod_base = um
  modified_base 20: mod_base = cm
  modified_base 21: mod_base = um
  source 1..21: mol_type = other RNA
tgcgaaaagcttgaacantct

SEQ ID NO: 1485 - RNA, 21 nt, synthetic construct
  modified_base 1: mod_base = gm
  modified_base 1^2: mod_base = OTHER; note = phosphorothioate linkage
  modified_base 2: mod_base = um
  modified_base 3: mod_base = gm
  modified_base 4: mod_base = cm
  modified_base 5: mod_base = OTHER; note = 2'-O-methyladenosine
  modified_base 6: mod_base = gm
  modified_base 7: mod_base = OTHER; note = 2'-O-methyladenosine
  modified_base 8: mod_base = um
  modified_base 9: mod_base = OTHER; note = 2'-fluorouridine
  modified_base 10: mod_base = OTHER; note = 2'-fluoroadenosine
  modified_base 11: mod_base = OTHER; note = 2'-fluoroguanosine
  modified_base 12: mod_base = OTHER; note = 2'-O-methyladenosine
  modified_base 13: mod_base = gm
  modified_base 14: mod_base = gm
  modified_base 15: mod_base = um
  modified_base 16: mod_base = um
  modified_base 17: mod_base = um
  modified_base 18: mod_base = cm
  modified_base 19: mod_base = gm
  modified_base 20: mod_base = um
  modified_base 21: mod_base = OTHER; note = 2'-O-methyladenosine
  source 1..21: mol_type = other RNA
gtgcagattagaggtttcgta

SEQ ID NO: 1486 - RNA, 21 nt, synthetic construct
  modified_base 1: mod_base = OTHER; note = 2'-O-methyladenosine
  modified_base 1^2: mod_base = OTHER; note = phosphorothioate linkage
  modified_base 2: mod_base = gm
  modified_base 3: mod_base = OTHER; note = 2'-O-methyladenosine
  modified_base 4: mod_base = um
  modified_base 5: mod_base = cm
  modified_base 6: mod_base = um
  modified_base 7: mod_base = gm
  modified_base 8: mod_base = um
  modified_base 9: mod_base = OTHER; note = 2'-fluorouridine
  modified_base 10: mod_base = OTHER; note = 2'-fluorocytidine
  modified_base 11: mod_base = OTHER; note = 2'-fluorocytidine
  modified_base 12: mod_base = OTHER; note = 2'-O-methyladenosine
  modified_base 13: mod_base = cm
  modified_base 14: mod_base = cm
  modified_base 15: mod_base = OTHER; note = 2'-O-methyladenosine
  modified_base 16: mod_base = um
  modified_base 17: mod_base = um
  modified_base 18: mod_base = gm
  modified_base 19: mod_base = OTHER; note = 2'-O-methyladenosine
  modified_base 20: mod_base = OTHER; note = 2'-O-methyladenosine
  modified_base 21: mod_base = OTHER; note = 2'-O-methyladenosine
  source 1..21: mol_type = other RNA
agatctgttccaccattgaaa

SEQ ID NO: 1487 - RNA, 21 nt, synthetic construct
  modified_base 1: mod_base = gm
  modified_base 1^2: mod_base = OTHER; note = phosphorothioate linkage
  modified_base 2: mod_base = gm
  modified_base 3: mod_base = OTHER; note = 2'-O-methyladenosine
  modified_base 4: mod_base = gm
  modified_base 5: mod_base = OTHER; note = 2'-O-methyladenosine
  modified_base 6: mod_base = um
  modified_base 7: mod_base = cm
  modified_base 8: mod_base = OTHER; note = 2'-O-methyladenosine
  modified_base 9: mod_base = OTHER; note = 2'-fluorouridine
  modified_base 10: mod_base = OTHER; note = 2'-fluoroguanosine
  modified_base 11: mod_base = OTHER; note = 2'-fluoroadenosine
  modified_base 12: mod_base = OTHER; note = 2'-O-methyladenosine
  modified_base 13: mod_base = gm
  modified_base 14: mod_base = OTHER; note = 2'-O-methyladenosine
  modified_base 15: mod_base = um
  modified_base 16: mod_base = cm
  modified_base 17: mod_base = um
  modified_base 18: mod_base = gm
  modified_base 19: mod_base = um
  modified_base 20: mod_base = um
  modified_base 21: mod_base = OTHER; note = 2'-O-methyladenosine
  source 1..21: mol_type = other RNA
ggagatcatgaagatctgtta

SEQ ID NO: 1488 - RNA, 21 nt, synthetic construct
  modified_base 1: mod_base = OTHER; note = 2'-O-methyladenosine
  modified_base 1^2: mod_base = OTHER; note = phosphorothioate linkage
  modified_base 2: mod_base = gm
  modified_base 3: mod_base = OTHER; note = 2'-O-methyladenosine
  modified_base 4: mod_base = um
  modified_base 5: mod_base = cm
  modified_base 6: mod_base = um
  modified_base 7: mod_base = gm
  modified_base 8: mod_base = um
  modified_base 9: mod_base = OTHER; note = 2'-fluorouridine
  modified_base 10: mod_base = OTHER; note = 2'-fluorocytidine
  modified_base 11: mod_base = OTHER; note = 2'-fluorocytidine
  modified_base 12: mod_base = OTHER; note = 2'-O-methyladenosine
  modified_base 13: mod_base = cm
  modified_base 14: mod_base = cm
  modified_base 15: mod_base = OTHER; note = 2'-O-methyladenosine
  modified_base 16: mod_base = um
  modified_base 17: mod_base = um
  modified_base 18: mod_base = gm
  modified_base 19: mod_base = OTHER; note = 2'-O-methyladenosine
  modified_base 20: mod_base = OTHER; note = 2'-O-methyladenosine
  modified_base 21: mod_base = OTHER; note = 2'-O-methyladenosine
  source 1..21: mol_type = other RNA
agatctgttccaccattgaaa

SEQ ID NO: 1489 - RNA, 21 nt, synthetic construct
  modified_base 1: mod_base = gm
  modified_base 1^2: mod_base = OTHER; note = phosphorothioate linkage
  modified_base 2: mod_base = OTHER; note = 2'-O-methyladenosine
  modified_base 3: mod_base = OTHER; note = 2'-O-methyladenosine
  modified_base 4: mod_base = cm
  modified_base 5: mod_base = OTHER; note = 2'-O-methyladenosine
  modified_base 6: mod_base = gm
  modified_base 7: mod_base = OTHER; note = 2'-O-methyladenosine
  modified_base 8: mod_base = OTHER; note = 2'-O-methyladenosine
  modified_base 9: mod_base = OTHER; note = 2'-fluorocytidine
  modified_base 10: mod_base = OTHER; note = 2'-fluoroadenosine
  modified_base 11: mod_base = OTHER; note = 2'-fluorocytidine
  modified_base 12: mod_base = OTHER; note = 2'-O-methyladenosine
  modified_base 13: mod_base = cm
  modified_base 14: mod_base = cm
  modified_base 15: mod_base = OTHER; note = 2'-O-methyladenosine
  modified_base 16: mod_base = OTHER; note = 2'-O-methyladenosine
  modified_base 17: mod_base = um
  modified_base 18: mod_base = OTHER; note = 2'-O-methyladenosine
  modified_base 19: mod_base = cm
  modified_base 20: mod_base = um
  modified_base 21: mod_base = OTHER; note = 2'-O-methyladenosine
  source 1..21: mol_type = other RNA
gaacagaacacaccaatacta

SEQ ID NO: 1490 - RNA, 21 nt, synthetic construct
  modified_base 1: mod_base = um
  modified_base 1^2: mod_base = OTHER; note = phosphorothioate linkage
  modified_base 2: mod_base = gm
  modified_base 3: mod_base = gm
  modified_base 4: mod_base = cm
  modified_base 5: mod_base = um
  modified_base 6: mod_base = cm
  modified_base 7: mod_base = um
  modified_base 8: mod_base = um
  modified_base 9: mod_base = OTHER; note = 2'-fluorocytidine
  modified_base 10: mod_base = OTHER; note = 2'-fluoroadenosine
  modified_base 11: mod_base = OTHER; note = 2'-fluoroadenosine
  modified_base 12: mod_base = um
  modified_base 13: mod_base = um
  modified_base 14: mod_base = gm
  modified_base 15: mod_base = um
  modified_base 16: mod_base = um
  modified_base 17: mod_base = cm
  modified_base 18: mod_base = OTHER; note = 2'-O-methyladenosine
  modified_base 19: mod_base = um
  modified_base 20: mod_base = cm
  modified_base 21: mod_base = OTHER; note = 2'-O-methyladenosine
  source 1..21: mol_type = other RNA
tggctcttcaattgttcatca

SEQ ID NO: 1491 - RNA, 21 nt, synthetic construct
  modified_base 1: mod_base = gm
  modified_base 1^2: mod_base = OTHER; note = phosphorothioate linkage
  modified_base 2: mod_base = gm
  modified_base 3: mod_base = gm
  modified_base 4: mod_base = OTHER; note = 2'-O-methyladenosine
  modified_base 5: mod_base = cm
  modified_base 6: mod_base = um
  modified_base 7: mod_base = cm
  modified_base 8: mod_base = um
  modified_base 9: mod_base = OTHER; note = 2'-fluoroadenosine
  modified_base 10: mod_base = OTHER; note = 2'-fluoroguanosine
  modified_base 11: mod_base = OTHER; note = 2'-fluorocytidine
  modified_base 12: mod_base = OTHER; note = 2'-O-methyladenosine
  modified_base 13: mod_base = um
  modified_base 14: mod_base = OTHER; note = 2'-O-methyladenosine
  modified_base 15: mod_base = cm
  modified_base 16: mod_base = um
  modified_base 17: mod_base = um
  modified_base 18: mod_base = OTHER; note = 2'-O-methyladenosine
  modified_base 19: mod_base = cm
  modified_base 20: mod_base = um
  modified_base 21: mod_base = OTHER; note = 2'-O-methyladenosine
  source 1..21: mol_type = other RNA
gggactctagcatacttacta

SEQ ID NO: 1492 - RNA, 21 nt, synthetic construct
  modified_base 1: mod_base = gm
  modified_base 1^2: mod_base = OTHER; note = phosphorothioate linkage
  modified_base 2: mod_base = cm
  modified_base 3: mod_base = gm
  modified_base 4: mod_base = OTHER; note = 2'-O-methyladenosine
  modified_base 5: mod_base = gm
  modified_base 6: mod_base = OTHER; note = 2'-O-methyladenosine
  modified_base 7: mod_base = um
  modified_base 8: mod_base = OTHER; note = 2'-O-methyladenosine
  modified_base 9: mod_base = OTHER; note = 2'-fluorocytidine
  modified_base 10: mod_base = OTHER; note = 2'-fluorouridine
  modified_base 11: mod_base = OTHER; note = 2'-fluorocytidine
  modified_base 12: mod_base = OTHER; note = 2'-O-methyladenosine
  modified_base 13: mod_base = cm
  modified_base 14: mod_base = um
  modified_base 15: mod_base = OTHER; note = 2'-O-methyladenosine
  modified_base 16: mod_base = OTHER; note = 2'-O-methyladenosine
  modified_base 17: mod_base = OTHER; note = 2 -O-methylinosine
  modified_base 18: mod_base = OTHER; note = 2'-O-methyladenosine
  modified_base 19: mod_base = cm
  modified_base 20: mod_base = cm
  modified_base 21: mod_base = OTHER; note = 2'-O-methyladenosine
  source 1..21: mol_type = other RNA
gcgagatactcactaanacca

SEQ ID NO: 1493 - RNA, 21 nt, synthetic construct
  modified_base 1: mod_base = gm
  modified_base 1^2: mod_base = OTHER; note = phosphorothioate linkage
  modified_base 2: mod_base = gm
  modified_base 3: mod_base = um
  modified_base 4: mod_base = cm
  modified_base 5: mod_base = gm
  modified_base 6: mod_base = OTHER; note = 2'-O-methyladenosine
  modified_base 7: mod_base = OTHER; note = 2'-O-methyladenosine
  modified_base 8: mod_base = OTHER; note = 2'-O-methyladenosine
  modified_base 9: mod_base = OTHER; note = 2'-fluoroguanosine
  modified_base 10: mod_base = OTHER; note = 2'-fluoroguanosine
  modified_base 11: mod_base = OTHER; note = 2'-fluorouridine
  modified_base 12: mod_base = um
  modified_base 13: mod_base = gm
  modified_base 14: mod_base = OTHER; note = 2'-O-methyladenosine
  modified_base 15: mod_base = OTHER; note = 2'-O-methyladenosine
  modified_base 16: mod_base = OTHER; note = 2'-O-methyladenosine
  modified_base 17: mod_base = cm
  modified_base 18: mod_base = OTHER; note = 2'-O-methyladenosine
  modified_base 19: mod_base = um
  modified_base 20: mod_base = gm
  modified_base 21: mod_base = OTHER; note = 2'-O-methyladenosine
  source 1..21: mol_type = other RNA
ggtcgaaaggttgaaacatga

SEQ ID NO: 1494 - RNA, 21 nt, synthetic construct
  modified_base 1: mod_base = um
  modified_base 1^2: mod_base = OTHER; note = phosphorothioate linkage
  modified_base 2: mod_base = gm
  modified_base 3: mod_base = OTHER; note = 2'-O-methyladenosine
  modified_base 4: mod_base = um
  modified_base 5: mod_base = gm
  modified_base 6: mod_base = gm
  modified_base 7: mod_base = um
  modified_base 8: mod_base = gm
  modified_base 9: mod_base = OTHER; note = 2'-fluoroguanosine
  modified_base 10: mod_base = OTHER; note = 2'-fluorocytidine
  modified_base 11: mod_base = OTHER; note = 2'-fluoroguanosine
  modified_base 12: mod_base = um
  modified_base 13: mod_base = OTHER; note = 2'-O-methyladenosine
  modified_base 14: mod_base = cm
  modified_base 15: mod_base = OTHER; note = 2'-O-methyladenosine
  modified_base 16: mod_base = um
  modified_base 17: mod_base = gm
  modified_base 18: mod_base = cm
  modified_base 19: mod_base = um
  modified_base 20: mod_base = OTHER; note = 2'-O-methyladenosine
  modified_base 21: mod_base = OTHER; note = 2'-O-methyladenosine
  source 1..21: mol_type = other RNA
tgatggtggcgtacatgctaa

SEQ ID NO: 1495 - RNA, 21 nt, synthetic construct
  modified_base 1: mod_base = OTHER; note = 2'-O-methyladenosine
  modified_base 1^2: mod_base = OTHER; note = phosphorothioate linkage
  modified_base 2: mod_base = gm
  modified_base 3: mod_base = gm
  modified_base 4: mod_base = OTHER; note = 2'-O-methyladenosine
  modified_base 5: mod_base = cm
  modified_base 6: mod_base = OTHER; note = 2'-O-methyladenosine
  modified_base 7: mod_base = OTHER; note = 2'-O-methyladenosine
  modified_base 8: mod_base = gm
  modified_base 9: mod_base = OTHER; note = 2'-fluorocytidine
  modified_base 10: mod_base = OTHER; note = 2'-fluoroguanosine
  modified_base 11: mod_base = OTHER; note = 2'-fluoroguanosine
  modified_base 12: mod_base = OTHER; note = 2'-O-methyladenosine
  modified_base 13: mod_base = um
  modified_base 14: mod_base = cm
  modified_base 15: mod_base = OTHER; note = 2'-O-methyladenosine
  modified_base 16: mod_base = um
  modified_base 17: mod_base = cm
  modified_base 18: mod_base = OTHER; note = 2'-O-methyladenosine
  modified_base 19: mod_base = gm
  modified_base 20: mod_base = um
  modified_base 21: mod_base = OTHER; note = 2'-O-methyladenosine
  source 1..21: mol_type = other RNA
aggacaagcggatcatcagta

SEQ ID NO: 1496 - RNA, 21 nt, synthetic construct
  modified_base 1: mod_base = gm
  modified_base 1^2: mod_base = OTHER; note = phosphorothioate linkage
  modified_base 2: mod_base = gm
  modified_base 3: mod_base = gm
  modified_base 4: mod_base = OTHER; note = 2'-O-methyladenosine
  modified_base 5: mod_base = cm
  modified_base 6: mod_base = um
  modified_base 7: mod_base = cm
  modified_base 8: mod_base = um
  modified_base 9: mod_base = OTHER; note = 2'-fluoroadenosine
  modified_base 10: mod_base = OTHER; note = 2'-fluoroguanosine
  modified_base 11: mod_base = OTHER; note = 2'-fluorocytidine
  modified_base 12: mod_base = OTHER; note = 2'-O-methyladenosine
  modified_base 13: mod_base = um
  modified_base 14: mod_base = OTHER; note = 2'-O-methyladenosine
  modified_base 15: mod_base = cm
  modified_base 16: mod_base = um
  modified_base 17: mod_base = um
  modified_base 18: mod_base = OTHER; note = 2'-O-methyladenosine
  modified_base 19: mod_base = cm
  modified_base 20: mod_base = um
  modified_base 21: mod_base = OTHER; note = 2'-O-methyladenosine
  source 1..21: mol_type = other RNA
gggactctagcatacttacta

SEQ ID NO: 1497 - RNA, 21 nt, synthetic construct
  modified_base 1: mod_base = um
  modified_base 1^2: mod_base = OTHER; note = phosphorothioate linkage
  modified_base 2: mod_base = cm
  modified_base 3: mod_base = gm
  modified_base 4: mod_base = cm
  modified_base 5: mod_base = um
  modified_base 6: mod_base = gm
  modified_base 7: mod_base = cm
  modified_base 8: mod_base = um
  modified_base 9: mod_base = OTHER; note = 2'-fluoroadenosine
  modified_base 10: mod_base = OTHER; note = 2'-fluoroguanosine
  modified_base 11: mod_base = OTHER; note = 2'-fluoroadenosine
  modified_base 12: mod_base = OTHER; note = 2'-O-methyladenosine
  modified_base 13: mod_base = OTHER; note = 2'-O-methyladenosine
  modified_base 14: mod_base = cm
  modified_base 15: mod_base = OTHER; note = 2'-O-methyladenosine
  modified_base 16: mod_base = um
  modified_base 17: mod_base = OTHER; note = 2'-O-methyladenosine
  modified_base 18: mod_base = gm
  modified_base 19: mod_base = um
  modified_base 20: mod_base = OTHER; note = 2'-O-methyladenosine
  modified_base 21: mod_base = OTHER; note = 2'-O-methyladenosine
  source 1..21: mol_type = other RNA
tcgctgctagaaacatagtaa

SEQ ID NO: 1498 - RNA, 21 nt, synthetic construct
  modified_base 1: mod_base = um
  modified_base 1^2: mod_base = OTHER; note = phosphorothioate linkage
  modified_base 2: mod_base = cm
  modified_base 3: mod_base = cm
  modified_base 4: mod_base = OTHER; note = 2'-O-methyladenosine
  modified_base 5: mod_base = gm
  modified_base 6: mod_base = um
  modified_base 7: mod_base = OTHER; note = 2'-O-methyladenosine
  modified_base 8: mod_base = um
  modified_base 9: mod_base = OTHER; note = 2'-fluorouridine
  modified_base 10: mod_base = OTHER; note = 2'-fluorocytidine
  modified_base 11: mod_base = OTHER; note = 2'-fluoroadenosine
  modified_base 12: mod_base = OTHER; note = 2'-O-methyladenosine
  modified_base 13: mod_base = um
  modified_base 14: mod_base = um
  modified_base 15: mod_base = OTHER; note = 2'-O-methyladenosine
  modified_base 16: mod_base = cm
  modified_base 17: mod_base = OTHER; note = 2'-O-methyladenosine
  modified_base 18: mod_base = OTHER; note = 2'-O-methyladenosine
  modified_base 19: mod_base = cm
  modified_base 20: mod_base = OTHER; note = 2'-O-methyladenosine
  modified_base 21: mod_base = OTHER; note = 2'-O-methyladenosine
  source 1..21: mol_type = other RNA
tccagtattcaattacaacaa

SEQ ID NO: 1499 - RNA, 21 nt, synthetic construct
  modified_base 1: mod_base = gm
  modified_base 1^2: mod_base = OTHER; note = phosphorothioate linkage
  modified_base 2: mod_base = cm
  modified_base 3: mod_base = cm
  modified_base 4: mod_base = um
  modified_base 5: mod_base = um
  modified_base 6: mod_base = cm
  modified_base 7: mod_base = cm
  modified_base 8: mod_base = um
  modified_base 9: mod_base = OTHER; note = 2'-fluorouridine
  modified_base 10: mod_base = OTHER; note = 2'-fluorouridine
  modified_base 11: mod_base = OTHER; note = 2'-fluoroguanosine
  modified_base 12: mod_base = OTHER; note = 2'-O-methyladenosine
  modified_base 13: mod_base = cm
  modified_base 14: mod_base = OTHER; note = 2'-O-methyladenosine
  modified_base 15: mod_base = um
  modified_base 16: mod_base = gm
  modified_base 17: mod_base = OTHER; note = 2'-O-methyladenosine
  modified_base 18: mod_base = gm
  modified_base 19: mod_base = um
  modified_base 20: mod_base = OTHER; note = 2'-O-methyladenosine
  modified_base 21: mod_base = OTHER; note = 2'-O-methyladenosine
  source 1..21: mol_type = other RNA
gccttcctttgacatgagtaa

SEQ ID NO: 1500 - RNA, 21 nt, synthetic construct
  modified_base 1: mod_base = gm
  modified_base 1^2: mod_base = OTHER; note = phosphorothioate linkage
  modified_base 2: mod_base = cm
  modified_base 3: mod_base = um
  modified_base 4: mod_base = cm
  modified_base 5: mod_base = um
  modified_base 6: mod_base = OTHER; note = 2'-O-methyladenosine
  modified_base 7: mod_base = OTHER; note = 2'-O-methyladenosine
  modified_base 8: mod_base = um
  modified_base 9: mod_base = OTHER; note = 2'-fluoroguanosine
  modified_base 10: mod_base = OTHER; note = 2'-fluorocytidine
  modified_base 11: mod_base = OTHER; note = 2'-fluoroadenosine
  modified_base 12: mod_base = OTHER; note = 2'-O-methyladenosine
  modified_base 13: mod_base = gm
  modified_base 14: mod_base = gm
  modified_base 15: mod_base = um
  modified_base 16: mod_base = um
  modified_base 17: mod_base = cm
  modified_base 18: mod_base = OTHER; note = 2'-O-methyladenosine
  modified_base 19: mod_base = OTHER; note = 2'-O-methyladenosine
  modified_base 20: mod_base = cm
  modified_base 21: mod_base = OTHER; note = 2'-O-methyladenosine
  source 1..21: mol_type = other RNA
gctctaatgcaaggttcaaca

SEQ ID NO: 1501 - RNA, 21 nt, synthetic construct
  modified_base 1: mod_base = OTHER; note = 2'-O-methyladenosine
  modified_base 1^2: mod_base = OTHER; note = phosphorothioate linkage
  modified_base 2: mod_base = cm
  modified_base 3: mod_base = gm
  modified_base 4: mod_base = OTHER; note = 2'-O-methyladenosine
  modified_base 5: mod_base = cm
  modified_base 6: mod_base = um
  modified_base 7: mod_base = OTHER; note = 2'-O-methyladenosine
  modified_base 8: mod_base = OTHER; note = 2'-O-methyladenosine
  modified_base 9: mod_base = OTHER; note = 2'-fluorouridine
  modified_base 10: mod_base = OTHER; note = 2'-fluorocytidine
  modified_base 11: mod_base = OTHER; note = 2'-fluorocytidine
  modified_base 12: mod_base = OTHER; note = 2'-O-methyladenosine
  modified_base 13: mod_base = gm
  modified_base 14: mod_base = OTHER; note = 2'-O-methyladenosine
  modified_base 15: mod_base = OTHER; note = 2'-O-methyladenosine
  modified_base 16: mod_base = um
  modified_base 17: mod_base = OTHER; note = 2'-O-methyladenosine
  modified_base 18: mod_base = gm
  modified_base 19: mod_base = cm
  modified_base 20: mod_base = OTHER; note = 2'-O-methyladenosine
  modified_base 21: mod_base = um
  source 1..21: mol_type = other RNA
acgactaatccagaatagcat

SEQ ID NO: 1502 - RNA, 21 nt, synthetic construct
  modified_base 1: mod_base = gm
  modified_base 1^2: mod_base = OTHER; note = phosphorothioate linkage
  modified_base 2: mod_base = OTHER; note = 2'-O-methyladenosine
  modified_base 3: mod_base = um
  modified_base 4: mod_base = cm
  modified_base 5: mod_base = OTHER; note = 2'-O-methyladenosine
  modified_base 6: mod_base = gm
  modified_base 7: mod_base = OTHER; note = 2'-O-methyladenosine
  modified_base 8: mod_base = OTHER; note = 2'-O-methyladenosine
  modified_base 9: mod_base = OTHER; note = 2'-fluorouridine
  modified_base 10: mod_base = OTHER; note = 2'-fluoroguanosine
  modified_base 11: mod_base = OTHER; note = 2'-fluoroadenosine
  modified_base 12: mod_base = um
  modified_base 13: mod_base = cm
  modified_base 14: mod_base = OTHER; note = 2'-O-methyladenosine
  modified_base 15: mod_base = OTHER; note = 2'-O-methyladenosine
  modified_base 16: mod_base = OTHER; note = 2'-O-methyladenosine
  modified_base 17: mod_base = cm
  modified_base 18: mod_base = OTHER; note = 2 -O-methylinosine
  modified_base 19: mod_base = um
  modified_base 20: mod_base = gm
  modified_base 21: mod_base = OTHER; note = 2'-O-methyladenosine
  source 1..21: mol_type = other RNA
gatcagaatgatcaaacntga

SEQ ID NO: 1503 - RNA, 21 nt, synthetic construct
  modified_base 1: mod_base = gm
  modified_base 1^2: mod_base = OTHER; note = phosphorothioate linkage
  modified_base 2: mod_base = cm
  modified_base 3: mod_base = cm
  modified_base 4: mod_base = um
  modified_base 5: mod_base = um
  modified_base 6: mod_base = cm
  modified_base 7: mod_base = cm
  modified_base 8: mod_base = um
  modified_base 9: mod_base = OTHER; note = 2'-fluorouridine
  modified_base 10: mod_base = OTHER; note = 2'-fluorouridine
  modified_base 11: mod_base = OTHER; note = 2'-fluoroguanosine
  modified_base 12: mod_base = OTHER; note = 2'-O-methyladenosine
  modified_base 13: mod_base = cm
  modified_base 14: mod_base = OTHER; note = 2'-O-methyladenosine
  modified_base 15: mod_base = um
  modified_base 16: mod_base = gm
  modified_base 17: mod_base = OTHER; note = 2'-O-methyladenosine
  modified_base 18: mod_base = gm
  modified_base 19: mod_base = um
  modified_base 20: mod_base = OTHER; note = 2'-O-methyladenosine
  modified_base 21: mod_base = OTHER; note = 2'-O-methyladenosine
  source 1..21: mol_type = other RNA
gccttcctttgacatgagtaa

SEQ ID NO: 1504 - RNA, 21 nt, synthetic construct
  modified_base 1: mod_base = cm
  modified_base 1^2: mod_base = OTHER; note = phosphorothioate linkage
  modified_base 2: mod_base = um
  modified_base 3: mod_base = gm
  modified_base 4: mod_base = um
  modified_base 5: mod_base = cm
  modified_base 6: mod_base = gm
  modified_base 7: mod_base = gm
  modified_base 8: mod_base = OTHER; note = 2'-O-methyladenosine
  modified_base 9: mod_base = OTHER; note = 2'-fluoroadenosine
  modified_base 10: mod_base = OTHER; note = 2'-fluoroguanosine
  modified_base 11: mod_base = OTHER; note = 2'-fluoroadenosine
  modified_base 12: mod_base = OTHER; note = 2'-O-methyladenosine
  modified_base 13: mod_base = um
  modified_base 14: mod_base = gm
  modified_base 15: mod_base = OTHER; note = 2'-O-methyladenosine
  modified_base 16: mod_base = um
  modified_base 17: mod_base = um
  modified_base 18: mod_base = gm
  modified_base 19: mod_base = gm
  modified_base 20: mod_base = um
  modified_base 21: mod_base = OTHER; note = 2'-O-methyladenosine
  source 1..21: mol_type = other RNA
ctgtcggaagaatgattggta

SEQ ID NO: 1505 - RNA, 21 nt, synthetic construct
  modified_base 1: mod_base = OTHER; note = 2'-O-methyladenosine
  modified_base 1^2: mod_base = OTHER; note = phosphorothioate linkage
  modified_base 2: mod_base = gm
  modified_base 3: mod_base = OTHER; note = 2'-O-methyladenosine
  modified_base 4: mod_base = gm
  modified_base 5: mod_base = OTHER; note = 2'-O-methyladenosine
  modified_base 6: mod_base = gm
  modified_base 7: mod_base = gm
  modified_base 8: mod_base = OTHER; note = 2'-O-methyladenosine
  modified_base 9: mod_base = OTHER; note = 2'-fluorouridine
  modified_base 10: mod_base = OTHER; note = 2'-fluoroguanosine
  modified_base 11: mod_base = OTHER; note = 2'-fluoroguanosine
  modified_base 12: mod_base = um
  modified_base 13: mod_base = gm
  modified_base 14: mod_base = cm
  modified_base 15: mod_base = um
  modified_base 16: mod_base = um
  modified_base 17: mod_base = um
  modified_base 18: mod_base = cm
  modified_base 19: mod_base = um
  modified_base 20: mod_base = gm
  modified_base 21: mod_base = OTHER; note = 2'-O-methyladenosine
  source 1..21: mol_type = other RNA
agagaggatggtgctttctga

SEQ ID NO: 1506 - RNA, 21 nt, synthetic construct
  modified_base 1: mod_base = cm
  modified_base 1^2: mod_base = OTHER; note = phosphorothioate linkage
  modified_base 2: mod_base = um
  modified_base 3: mod_base = gm
  modified_base 4: mod_base = OTHER; note = 2'-O-methyladenosine
  modified_base 5: mod_base = OTHER; note = 2'-O-methyladenosine
  modified_base 6: mod_base = um
  modified_base 7: mod_base = gm
  modified_base 8: mod_base = OTHER; note = 2'-O-methyladenosine
  modified_base 9: mod_base = OTHER; note = 2'-fluorouridine
  modified_base 10: mod_base = OTHER; note = 2'-fluoroguanosine
  modified_base 11: mod_base = OTHER; note = 2'-fluorocytidine
  modified_base 12: mod_base = cm
  modified_base 13: mod_base = OTHER; note = 2'-O-methyladenosine
  modified_base 14: mod_base = cm
  modified_base 15: mod_base = OTHER; note = 2'-O-methyladenosine
  modified_base 16: mod_base = um
  modified_base 17: mod_base = OTHER; note = 2'-O-methyladenosine
  modified_base 18: mod_base = um
  modified_base 19: mod_base = cm
  modified_base 20: mod_base = OTHER; note = 2'-O-methyladenosine
  modified_base 21: mod_base = OTHER; note = 2'-O-methyladenosine
  source 1..21: mol_type = other RNA
ctgaatgatgccacatatcaa

SEQ ID NO: 1507 - RNA, 21 nt, synthetic construct
  modified_base 1: mod_base = OTHER; note = 2'-O-methyladenosine
  modified_base 1^2: mod_base = OTHER; note = phosphorothioate linkage
  modified_base 2: mod_base = cm
  modified_base 3: mod_base = gm
  modified_base 4: mod_base = gm
  modified_base 5: mod_base = um
  modified_base 6: mod_base = cm
  modified_base 7: mod_base = OTHER; note = 2'-O-methyladenosine
  modified_base 8: mod_base = gm
  modified_base 9: mod_base = OTHER; note = 2'-fluorocytidine
  modified_base 10: mod_base = OTHER; note = 2'-fluoroadenosine
  modified_base 11: mod_base = OTHER; note = 2'-fluorocytidine
  modified_base 12: mod_base = um
  modified_base 13: mod_base = cm
  modified_base 14: mod_base = OTHER; note = 2'-O-methyladenosine
  modified_base 15: mod_base = um
  modified_base 16: mod_base = um
  modified_base 17: mod_base = cm
  modified_base 18: mod_base = um
  modified_base 19: mod_base = gm
  modified_base 20: mod_base = OTHER; note = 2'-O-methyladenosine
  modified_base 21: mod_base = OTHER; note = 2'-O-methyladenosine
  source 1..21: mol_type = other RNA
acggtcagcactcattctgaa

SEQ ID NO: 1508 - RNA, 21 nt, synthetic construct
  modified_base 1: mod_base = gm
  modified_base 1^2: mod_base = OTHER; note = phosphorothioate linkage
  modified_base 2: mod_base = cm
  modified_base 3: mod_base = um
  modified_base 4: mod_base = cm
  modified_base 5: mod_base = OTHER; note = 2'-O-methyladenosine
  modified_base 6: mod_base = cm
  modified_base 7: mod_base = OTHER; note = 2'-O-methyladenosine
  modified_base 8: mod_base = OTHER; note = 2'-O-methyladenosine
  modified_base 9: mod_base = OTHER; note = 2'-fluoroguanosine
  modified_base 10: mod_base = OTHER; note = 2'-fluoroadenosine
  modified_base 11: mod_base = OTHER; note = 2'-fluoroguanosine
  modified_base 12: mod_base = um
  modified_base 13: mod_base = cm
  modified_base 14: mod_base = OTHER; note = 2'-O-methyladenosine
  modified_base 15: mod_base = OTHER; note = 2'-O-methyladenosine
  modified_base 16: mod_base = um
  modified_base 17: mod_base = um
  modified_base 18: mod_base = gm
  modified_base 19: mod_base = gm
  modified_base 20: mod_base = um
  modified_base 21: mod_base = OTHER; note = 2'-O-methyladenosine
  source 1..21: mol_type = other RNA
gctcacaagagtcaattggta

SEQ ID NO: 1509 - RNA, 21 nt, synthetic construct
  modified_base 1: mod_base = gm
  modified_base 1^2: mod_base = OTHER; note = phosphorothioate linkage
  modified_base 2: mod_base = um
  modified_base 3: mod_base = OTHER; note = 2'-O-methyladenosine
  modified_base 4: mod_base = OTHER; note = 2'-O-methyladenosine
  modified_base 5: mod_base = um
  modified_base 6: mod_base = gm
  modified_base 7: mod_base = OTHER; note = 2'-O-methyladenosine
  modified_base 8: mod_base = OTHER; note = 2'-O-methyladenosine
  modified_base 9: mod_base = OTHER; note = 2'-fluoroguanosine
  modified_base 10: mod_base = OTHER; note = 2'-fluoroguanosine
  modified_base 11: mod_base = OTHER; note = 2'-fluoroguanosine
  modified_base 12: mod_base = um
  modified_base 13: mod_base = cm
  modified_base 14: mod_base = um
  modified_base 15: mod_base = um
  modified_base 16: mod_base = OTHER; note = 2'-O-methyladenosine
  modified_base 17: mod_base = um
  modified_base 18: mod_base = um
  modified_base 19: mod_base = um
  modified_base 20: mod_base = cm
  modified_base 21: mod_base = um
  source 1..21: mol_type = other RNA
gtaatgaagggtcttatttct

SEQ ID NO: 1510 - RNA, 21 nt, synthetic construct
  modified_base 1: mod_base = gm
  modified_base 1^2: mod_base = OTHER; note = phosphorothioate linkage
  modified_base 2: mod_base = OTHER; note = 2'-O-methyladenosine
  modified_base 3: mod_base = cm
  modified_base 4: mod_base = um
  modified_base 5: mod_base = um
  modified_base 6: mod_base = um
  modified_base 7: mod_base = gm
  modified_base 8: mod_base = um
  modified_base 9: mod_base = OTHER; note = 2'-fluoroguanosine
  modified_base 10: mod_base = OTHER; note = 2'-fluorocytidine
  modified_base 11: mod_base = OTHER; note = 2'-fluoroguanosine
  modified_base 12: mod_base = OTHER; note = 2'-O-methyladenosine
  modified_base 13: mod_base = cm
  modified_base 14: mod_base = OTHER; note = 2'-O-methyladenosine
  modified_base 15: mod_base = OTHER; note = 2'-O-methyladenosine
  modified_base 16: mod_base = um
  modified_base 17: mod_base = gm
  modified_base 18: mod_base = cm
  modified_base 19: mod_base = um
  modified_base 20: mod_base = um
  modified_base 21: mod_base = OTHER; note = 2'-O-methyladenosine
  source 1..21: mol_type = other RNA
gactttgtgcgacaatgctta

SEQ ID NO: 1511 - RNA, 21 nt, synthetic construct
  modified_base 1: mod_base = cm
  modified_base 1^2: mod_base = OTHER; note = phosphorothioate linkage
  modified_base 2: mod_base = cm
  modified_base 3: mod_base = OTHER; note = 2'-O-methyladenosine
  modified_base 4: mod_base = cm
  modified_base 5: mod_base = um
  modified_base 6: mod_base = OTHER; note = 2'-O-methyladenosine
  modified_base 7: mod_base = um
  modified_base 8: mod_base = OTHER; note = 2'-O-methyladenosine
  modified_base 9: mod_base = OTHER; note = 2'-fluorouridine
  modified_base 10: mod_base = OTHER; note = 2'-fluoroguanosine
  modified_base 11: mod_base = OTHER; note = 2'-fluoroadenosine
  modified_base 12: mod_base = um
  modified_base 13: mod_base = gm
  modified_base 14: mod_base = cm
  modified_base 15: mod_base = OTHER; note = 2'-O-methyladenosine
  modified_base 16: mod_base = OTHER; note = 2'-O-methyladenosine
  modified_base 17: mod_base = um
  modified_base 18: mod_base = cm
  modified_base 19: mod_base = OTHER; note = 2'-O-methyladenosine
  modified_base 20: mod_base = OTHER; note = 2'-O-methyladenosine
  modified_base 21: mod_base = OTHER; note = 2'-O-methyladenosine
  source 1..21: mol_type = other RNA
ccactatatgatgcaatcaaa

SEQ ID NO: 1512 - RNA, 21 nt, synthetic construct
  modified_base 1: mod_base = gm
  modified_base 1^2: mod_base = OTHER; note = phosphorothioate linkage
  modified_base 2: mod_base = OTHER; note = 2 -O-methyl-2-aminoadenosine
  modified_base 3: mod_base = OTHER; note = 2'-O-methyladenosine
  modified_base 4: mod_base = um
  modified_base 5: mod_base = cm
  modified_base 6: mod_base = OTHER; note = 2'-O-methyladenosine
  modified_base 7: mod_base = OTHER; note = 2'-O-methyladenosine
  modified_base 8: mod_base = OTHER; note = 2'-O-methyladenosine
  modified_base 9: mod_base = OTHER; note = 2'-fluoroadenosine
  modified_base 10: mod_base = OTHER; note = 2'-fluorocytidine
  modified_base 11: mod_base = OTHER; note = 2'-fluorouridine
  modified_base 12: mod_base = OTHER; note = 2'-O-methyladenosine
  modified_base 13: mod_base = gm
  modified_base 14: mod_base = gm
  modified_base 15: mod_base = cm
  modified_base 16: mod_base = um
  modified_base 17: mod_base = um
  modified_base 18: mod_base = um
  modified_base 19: mod_base = um
  modified_base 20: mod_base = cm
  modified_base 21: mod_base = OTHER; note = 2'-O-methyladenosine
  source 1..21: mol_type = other RNA
gaatcaaaactaggcttttca

SEQ ID NO: 1513 - RNA, 21 nt, synthetic construct
  modified_base 1: mod_base = um
  modified_base 1^2: mod_base = OTHER; note = phosphorothioate linkage
  modified_base 2: mod_base = gm
  modified_base 3: mod_base = cm
  modified_base 4: mod_base = OTHER; note = 2'-O-methyladenosine
  modified_base 5: mod_base = OTHER; note = 2'-O-methyladenosine
  modified_base 6: mod_base = OTHER; note = 2'-O-methyladenosine
  modified_base 7: mod_base = gm
  modified_base 8: mod_base = OTHER; note = 2'-O-methyladenosine
  modified_base 9: mod_base = OTHER; note = 2'-fluorouridine
  modified_base 10: mod_base = OTHER; note = 2'-fluoroguanosine
  modified_base 11: mod_base = OTHER; note = 2'-fluorouridine
  modified_base 12: mod_base = um
  modified_base 13: mod_base = gm
  modified_base 14: mod_base = gm
  modified_base 15: mod_base = OTHER; note = 2'-O-methyladenosine
  modified_base 16: mod_base = OTHER; note = 2 -O-methylinosine
  modified_base 17: mod_base = OTHER; note = 2'-O-methyladenosine
  modified_base 18: mod_base = cm
  modified_base 19: mod_base = cm
  modified_base 20: mod_base = um
  modified_base 21: mod_base = um
  source 1..21: mol_type = other RNA
tgcaaagatgttgganacctt

SEQ ID NO: 1514 - RNA, 21 nt, synthetic construct
  modified_base 1: mod_base = cm
  modified_base 1^2: mod_base = OTHER; note = phosphorothioate linkage
  modified_base 2: mod_base = gm
  modified_base 3: mod_base = OTHER; note = 2'-O-methyladenosine
  modified_base 4: mod_base = gm
  modified_base 5: mod_base = gm
  modified_base 6: mod_base = OTHER; note = 2'-O-methyladenosine
  modified_base 7: mod_base = gm
  modified_base 8: mod_base = um
  modified_base 9: mod_base = OTHER; note = 2'-fluoroguanosine
  modified_base 10: mod_base = OTHER; note = 2'-fluorocytidine
  modified_base 11: mod_base = OTHER; note = 2'-fluorocytidine
  modified_base 12: mod_base = um
  modified_base 13: mod_base = gm
  modified_base 14: mod_base = OTHER; note = 2'-O-methyladenosine
  modified_base 15: mod_base = um
  modified_base 16: mod_base = um
  modified_base 17: mod_base = OTHER; note = 2'-O-methyladenosine
  modified_base 18: mod_base = OTHER; note = 2'-O-methyladenosine
  modified_base 19: mod_base = um
  modified_base 20: mod_base = gm
  modified_base 21: mod_base = OTHER; note = 2'-O-methyladenosine
  source 1..21: mol_type = other RNA
cgaggagtgcctgattaatga

SEQ ID NO: 1515 - RNA, 21 nt, synthetic construct
  modified_base 1: mod_base = gm
  modified_base 1^2: mod_base = OTHER; note = phosphorothioate linkage
  modified_base 2: mod_base = OTHER; note = 2'-O-methyladenosine
  modified_base 3: mod_base = cm
  modified_base 4: mod_base = um
  modified_base 5: mod_base = um
  modified_base 6: mod_base = um
  modified_base 7: mod_base = gm
  modified_base 8: mod_base = um
  modified_base 9: mod_base = OTHER; note = 2'-fluoroguanosine
  modified_base 10: mod_base = OTHER; note = 2'-fluorocytidine
  modified_base 11: mod_base = OTHER; note = 2'-fluoroguanosine
  modified_base 12: mod_base = OTHER; note = 2'-O-methyladenosine
  modified_base 13: mod_base = cm
  modified_base 14: mod_base = OTHER; note = 2'-O-methyladenosine
  modified_base 15: mod_base = OTHER; note = 2'-O-methyladenosine
  modified_base 16: mod_base = um
  modified_base 17: mod_base = gm
  modified_base 18: mod_base = cm
  modified_base 19: mod_base = um
  modified_base 20: mod_base = um
  modified_base 21: mod_base = OTHER; note = 2'-O-methyladenosine
  source 1..21: mol_type = other RNA
gactttgtgcgacaatgctta

SEQ ID NO: 1516 - RNA, 21 nt, synthetic construct
  modified_base 1: mod_base = cm
  modified_base 1^2: mod_base = OTHER; note = phosphorothioate linkage
  modified_base 2: mod_base = cm
  modified_base 3: mod_base = OTHER; note = 2'-O-methyladenosine
  modified_base 4: mod_base = cm
  modified_base 5: mod_base = um
  modified_base 6: mod_base = OTHER; note = 2'-O-methyladenosine
  modified_base 7: mod_base = um
  modified_base 8: mod_base = OTHER; note = 2'-O-methyladenosine
  modified_base 9: mod_base = OTHER; note = 2'-fluorouridine
  modified_base 10: mod_base = OTHER; note = 2'-fluoroguanosine
  modified_base 11: mod_base = OTHER; note = 2'-fluoroadenosine
  modified_base 12: mod_base = um
  modified_base 13: mod_base = gm
  modified_base 14: mod_base = cm
  modified_base 15: mod_base = OTHER; note = 2'-O-methyladenosine
  modified_base 16: mod_base = OTHER; note = 2'-O-methyladenosine
  modified_base 17: mod_base = um
  modified_base 18: mod_base = cm
  modified_base 19: mod_base = OTHER; note = 2'-O-methyladenosine
  modified_base 20: mod_base = OTHER; note = 2'-O-methyladenosine
  modified_base 21: mod_base = OTHER; note = 2'-O-methyladenosine
  source 1..21: mol_type = other RNA
ccactatatgatgcaatcaaa

SEQ ID NO: 1517 - RNA, 21 nt, synthetic construct
  modified_base 1: mod_base = gm
  modified_base 1^2: mod_base = OTHER; note = phosphorothioate linkage
  modified_base 2: mod_base = gm
  modified_base 3: mod_base = um
  modified_base 4: mod_base = OTHER; note = 2'-O-methyladenosine
  modified_base 5: mod_base = um
  modified_base 6: mod_base = um
  modified_base 7: mod_base = cm
  modified_base 8: mod_base = gm
  modified_base 9: mod_base = OTHER; note = 2'-fluoroguanosine
  modified_base 10: mod_base = OTHER; note = 2'-fluoroadenosine
  modified_base 11: mod_base = OTHER; note = 2'-fluorouridine
  modified_base 12: mod_base = um
  modified_base 13: mod_base = um
  modified_base 14: mod_base = cm
  modified_base 15: mod_base = cm
  modified_base 16: mod_base = OTHER; note = 2'-O-methyladenosine
  modified_base 17: mod_base = um
  modified_base 18: mod_base = um
  modified_base 19: mod_base = um
  modified_base 20: mod_base = cm
  modified_base 21: mod_base = OTHER; note = 2'-O-methyladenosine
  source 1..21: mol_type = other RNA
ggtattcggatttccatttca

SEQ ID NO: 1518 - RNA, 21 nt, synthetic construct
  modified_base 1: mod_base = gm
  modified_base 1^2: mod_base = OTHER; note = phosphorothioate linkage
  modified_base 2: mod_base = cm
  modified_base 3: mod_base = cm
  modified_base 4: mod_base = um
  modified_base 5: mod_base = OTHER; note = 2'-O-methyladenosine
  modified_base 6: mod_base = um
  modified_base 7: mod_base = gm
  modified_base 8: mod_base = um
  modified_base 9: mod_base = OTHER; note = 2'-fluoroadenosine
  modified_base 10: mod_base = OTHER; note = 2'-fluoroguanosine
  modified_base 11: mod_base = OTHER; note = 2'-fluoroadenosine
  modified_base 12: mod_base = um
  modified_base 13: mod_base = gm
  modified_base 14: mod_base = gm
  modified_base 15: mod_base = OTHER; note = 2'-O-methyladenosine
  modified_base 16: mod_base = um
  modified_base 17: mod_base = um
  modified_base 18: mod_base = cm
  modified_base 19: mod_base = gm
  modified_base 20: mod_base = OTHER; note = 2'-O-methyladenosine
  modified_base 21: mod_base = OTHER; note = 2'-O-methyladenosine
  source 1..21: mol_type = other RNA
gcctatgtagatggattcgaa

SEQ ID NO: 1519 - RNA, 21 nt, synthetic construct
  modified_base 1: mod_base = OTHER; note = 2'-O-methyladenosine
  modified_base 1^2: mod_base = OTHER; note = phosphorothioate linkage
  modified_base 2: mod_base = um
  modified_base 3: mod_base = cm
  modified_base 4: mod_base = cm
  modified_base 5: mod_base = cm
  modified_base 6: mod_base = OTHER; note = 2'-O-methyladenosine
  modified_base 7: mod_base = OTHER; note = 2'-O-methyladenosine
  modified_base 8: mod_base = um
  modified_base 9: mod_base = OTHER; note = 2'-fluoroguanosine
  modified_base 10: mod_base = OTHER; note = 2 -O-methyl-2-aminoadenosine
  modified_base 11: mod_base = OTHER; note = 2'-fluorouridine
  modified_base 12: mod_base = OTHER; note = 2'-O-methyladenosine
  modified_base 13: mod_base = OTHER; note = 2'-O-methyladenosine
  modified_base 14: mod_base = gm
  modified_base 15: mod_base = cm
  modified_base 16: mod_base = OTHER; note = 2'-O-methyladenosine
  modified_base 17: mod_base = OTHER; note = 2'-O-methyladenosine
  modified_base 18: mod_base = OTHER; note = 2'-O-methyladenosine
  modified_base 19: mod_base = um
  modified_base 20: mod_base = gm
  modified_base 21: mod_base = um
  source 1..21: mol_type = other RNA
atcccaatgataagcaaatgt

SEQ ID NO: 1520 - RNA, 21 nt, synthetic construct
  modified_base 1: mod_base = cm
  modified_base 1^2: mod_base = OTHER; note = phosphorothioate linkage
  modified_base 2: mod_base = um
  modified_base 3: mod_base = OTHER; note = 2'-O-methyladenosine
  modified_base 4: mod_base = OTHER; note = 2'-O-methyladenosine
  modified_base 5: mod_base = cm
  modified_base 6: mod_base = cm
  modified_base 7: mod_base = gm
  modified_base 8: mod_base = OTHER; note = 2'-O-methyladenosine
  modified_base 9: mod_base = OTHER; note = 2'-fluoroguanosine
  modified_base 10: mod_base = OTHER; note = 2'-fluoroguanosine
  modified_base 11: mod_base = OTHER; note = 2'-fluorouridine
  modified_base 12: mod_base = cm
  modified_base 13: mod_base = gm
  modified_base 14: mod_base = OTHER; note = 2'-O-methyladenosine
  modified_base 15: mod_base = OTHER; note = 2'-O-methyladenosine
  modified_base 16: mod_base = OTHER; note = 2'-O-methyladenosine
  modified_base 17: mod_base = cm
  modified_base 18: mod_base = gm
  modified_base 19: mod_base = um
  modified_base 20: mod_base = OTHER; note = 2'-O-methyladenosine
  modified_base 21: mod_base = OTHER; note = 2'-O-methyladenosine
  source 1..21: mol_type = other RNA
ctaaccgaggtcgaaacgtaa

SEQ ID NO: 1521 - RNA, 21 nt, synthetic construct
  modified_base 1: mod_base = OTHER; note = 2'-O-methyladenosine
  modified_base 1^2: mod_base = OTHER; note = phosphorothioate linkage
  modified_base 2: mod_base = cm
  modified_base 3: mod_base = gm
  modified_base 4: mod_base = um
  modified_base 5: mod_base = OTHER; note = 2'-O-methyladenosine
  modified_base 6: mod_base = cm
  modified_base 7: mod_base = gm
  modified_base 8: mod_base = um
  modified_base 9: mod_base = OTHER; note = 2'-fluorouridine
  modified_base 10: mod_base = OTHER; note = 2'-fluorocytidine
  modified_base 11: mod_base = OTHER; note = 2'-fluorouridine
  modified_base 12: mod_base = um
  modified_base 13: mod_base = um
  modified_base 14: mod_base = cm
  modified_base 15: mod_base = um
  modified_base 16: mod_base = OTHER; note = 2'-O-methyladenosine
  modified_base 17: mod_base = um
  modified_base 18: mod_base = cm
  modified_base 19: mod_base = OTHER; note = 2'-O-methyladenosine
  modified_base 20: mod_base = um
  modified_base 21: mod_base = OTHER; note = 2'-O-methyladenosine
  source 1..21: mol_type = other RNA
acgtacgttctttctatcata

SEQ ID NO: 1522 - RNA, 21 nt, synthetic construct
  modified_base 1: mod_base = gm
  modified_base 1^2: mod_base = OTHER; note = phosphorothioate linkage
  modified_base 2: mod_base = um
  modified_base 3: mod_base = um
  modified_base 4: mod_base = gm
  modified_base 5: mod_base = OTHER; note = 2'-O-methyladenosine
  modified_base 6: mod_base = cm
  modified_base 7: mod_base = gm
  modified_base 8: mod_base = OTHER; note = 2'-O-methyladenosine
  modified_base 9: mod_base = OTHER; note = 2'-fluorouridine
  modified_base 10: mod_base = OTHER; note = 2'-fluoroguanosine
  modified_base 11: mod_base = OTHER; note = 2'-fluoroguanosine
  modified_base 12: mod_base = um
  modified_base 13: mod_base = cm
  modified_base 14: mod_base = OTHER; note = 2'-O-methyladenosine
  modified_base 15: mod_base = um
  modified_base 16: mod_base = um
  modified_base 17: mod_base = um
  modified_base 18: mod_base = um
  modified_base 19: mod_base = gm
  modified_base 20: mod_base = um
  modified_base 21: mod_base = OTHER; note = 2'-O-methyladenosine
  source 1..21: mol_type = other RNA
gttgacgatggtcattttgta

SEQ ID NO: 1523 - RNA, 21 nt, synthetic construct
  modified_base 1: mod_base = gm
  modified_base 1^2: mod_base = OTHER; note = phosphorothioate linkage
  modified_base 2: mod_base = um
  modified_base 3: mod_base = gm
  modified_base 4: mod_base = OTHER; note = 2'-O-methyladenosine
  modified_base 5: mod_base = cm
  modified_base 6: mod_base = gm
  modified_base 7: mod_base = OTHER; note = 2'-O-methyladenosine
  modified_base 8: mod_base = um
  modified_base 9: mod_base = OTHER; note = 2'-fluoroguanosine
  modified_base 10: mod_base = OTHER; note = 2'-fluoroguanosine
  modified_base 11: mod_base = OTHER; note = 2'-fluorouridine
  modified_base 12: mod_base = cm
  modified_base 13: mod_base = OTHER; note = 2'-O-methyladenosine
  modified_base 14: mod_base = um
  modified_base 15: mod_base = um
  modified_base 16: mod_base = um
  modified_base 17: mod_base = um
  modified_base 18: mod_base = gm
  modified_base 19: mod_base = um
  modified_base 20: mod_base = cm
  modified_base 21: mod_base = OTHER; note = 2'-O-methyladenosine
  source 1..21: mol_type = other RNA
gtgacgatggtcattttgtca

SEQ ID NO: 1524 - RNA, 21 nt, synthetic construct
  modified_base 1: mod_base = cm
  modified_base 1^2: mod_base = OTHER; note = phosphorothioate linkage
  modified_base 2: mod_base = um
  modified_base 3: mod_base = OTHER; note = 2'-O-methyladenosine
  modified_base 4: mod_base = OTHER; note = 2'-O-methyladenosine
  modified_base 5: mod_base = cm
  modified_base 6: mod_base = cm
  modified_base 7: mod_base = gm
  modified_base 8: mod_base = OTHER; note = 2'-O-methyladenosine
  modified_base 9: mod_base = OTHER; note = 2'-fluoroguanosine
  modified_base 10: mod_base = gm
  modified_base 11: mod_base = OTHER; note = 2'-fluorouridine
  modified_base 12: mod_base = cm
  modified_base 13: mod_base = OTHER; note = 2'-fluoroguanosine
  modified_base 14: mod_base = OTHER; note = 2'-O-methyladenosine
  modified_base 15: mod_base = OTHER; note = 2'-O-methyladenosine
  modified_base 16: mod_base = OTHER; note = 2'-O-methyladenosine
  modified_base 17: mod_base = cm
  modified_base 18: mod_base = gm
  modified_base 19: mod_base = um
  modified_base 20: mod_base = OTHER; note = 2'-O-methyladenosine
  modified_base 21: mod_base = OTHER; note = 2'-O-methyladenosine
  source 1..21: mol_type = other RNA
ctaaccgaggtcgaaacgtaa

SEQ ID NO: 1525 - RNA, 21 nt, synthetic construct
  modified_base 1: mod_base = cm
  modified_base 1^2: mod_base = OTHER; note = phosphorothioate linkage
  modified_base 2: mod_base = um
  modified_base 3: mod_base = OTHER; note = 2'-O-methyladenosine
  modified_base 4: mod_base = OTHER; note = 2'-O-methyladenosine
  modified_base 5: mod_base = cm
  modified_base 6: mod_base = cm
  modified_base 7: mod_base = gm
  modified_base 8: mod_base = OTHER; note = 2'-O-methyladenosine
  modified_base 9: mod_base = OTHER; note = 2'-fluoroguanosine
  modified_base 10: mod_base = gm
  modified_base 11: mod_base = OTHER; note = 2'-fluorouridine
  modified_base 12: mod_base = cm
  modified_base 13: mod_base = gm
  modified_base 14: mod_base = OTHER; note = 2'-O-methyladenosine
  modified_base 15: mod_base = OTHER; note = 2'-O-methyladenosine
  modified_base 16: mod_base = OTHER; note = 2'-O-methyladenosine
  modified_base 17: mod_base = cm
  modified_base 18: mod_base = gm
  modified_base 19: mod_base = um
  modified_base 20: mod_base = OTHER; note = 2'-O-methyladenosine
  modified_base 21: mod_base = OTHER; note = 2'-O-methyladenosine
  source 1..21: mol_type = other RNA
ctaaccgaggtcgaaacgtaa

SEQ ID NO: 1526 - RNA, 21 nt, synthetic construct
  modified_base 1: mod_base = cm
  modified_base 1^2: mod_base = OTHER; note = phosphorothioate linkage
  modified_base 2: mod_base = cm
  modified_base 3: mod_base = cm
  modified_base 4: mod_base = gm
  modified_base 5: mod_base = OTHER; note = 2'-O-methyladenosine
  modified_base 6: mod_base = OTHER; note = 2'-O-methyladenosine
  modified_base 7: mod_base = cm
  modified_base 8: mod_base = OTHER; note = 2'-O-methyladenosine
  modified_base 9: mod_base = OTHER; note = 2'-fluoroadenosine
  modified_base 10: mod_base = OTHER; note = 2'-fluorocytidine
  modified_base 11: mod_base = OTHER; note = 2'-fluoroadenosine
  modified_base 12: mod_base = um
  modified_base 13: mod_base = gm
  modified_base 14: mod_base = gm
  modified_base 15: mod_base = OTHER; note = 2'-O-methyladenosine
  modified_base 16: mod_base = um
  modified_base 17: mod_base = OTHER; note = 2'-O-methyladenosine
  modified_base 18: mod_base = gm
  modified_base 19: mod_base = OTHER; note = 2'-O-methyladenosine
  modified_base 20: mod_base = gm
  modified_base 21: mod_base = OTHER; note = 2'-O-methyladenosine
  source 1..21: mol_type = other RNA
cccgaacaacatggatagaga

SEQ ID NO: 1527 - RNA, 21 nt, synthetic construct
  modified_base 1: mod_base = gm
  modified_base 1^2: mod_base = OTHER; note = phosphorothioate linkage
  modified_base 2: mod_base = OTHER; note = 2'-O-methyladenosine
  modified_base 3: mod_base = cm
  modified_base 4: mod_base = OTHER; note = 2'-O-methyladenosine
  modified_base 5: mod_base = OTHER; note = 2'-O-methyladenosine
  modified_base 6: mod_base = cm
  modified_base 7: mod_base = OTHER; note = 2'-O-methyladenosine
  modified_base 8: mod_base = um
  modified_base 9: mod_base = OTHER; note = 2'-fluoroguanosine
  modified_base 10: mod_base = OTHER; note = 2'-fluoroguanosine
  modified_base 11: mod_base = OTHER; note = 2'-fluoroadenosine
  modified_base 12: mod_base = um
  modified_base 13: mod_base = OTHER; note = 2'-O-methyladenosine
  modified_base 14: mod_base = gm
  modified_base 15: mod_base = OTHER; note = 2'-O-methyladenosine
  modified_base 16: mod_base = OTHER; note = 2 -O-methylinosine
  modified_base 17: mod_base = cm
  modified_base 18: mod_base = OTHER; note = 2'-O-methyladenosine
  modified_base 19: mod_base = gm
  modified_base 20: mod_base = um
  modified_base 21: mod_base = um
  source 1..21: mol_type = other RNA
gacaacatggatagancagtt

SEQ ID NO: 1528 - RNA, 21 nt, synthetic construct
  modified_base 1: mod_base = OTHER; note = 2 -O-methyl-2-aminoadenosine
  modified_base 1^2: mod_base = OTHER; note = phosphorothioate linkage
  modified_base 2: mod_base = cm
  modified_base 3: mod_base = gm
  modified_base 4: mod_base = um
  modified_base 5: mod_base = OTHER; note = 2'-O-methyladenosine
  modified_base 6: mod_base = cm
  modified_base 7: mod_base = gm
  modified_base 8: mod_base = um
  modified_base 9: mod_base = OTHER; note = 2'-fluorouridine
  modified_base 10: mod_base = OTHER; note = 2'-fluorocytidine
  modified_base 11: mod_base = OTHER; note = 2'-fluorouridine
  modified_base 12: mod_base = um
  modified_base 13: mod_base = um
  modified_base 14: mod_base = cm
  modified_base 15: mod_base = um
  modified_base 16: mod_base = OTHER; note = 2'-O-methyladenosine
  modified_base 17: mod_base = um
  modified_base 18: mod_base = cm
  modified_base 19: mod_base = OTHER; note = 2'-O-methyladenosine
  modified_base 20: mod_base = um
  modified_base 21: mod_base = OTHER; note = 2'-O-methyladenosine
  source 1..21: mol_type = other RNA
acgtacgttctttctatcata

SEQ ID NO: 1529 - RNA, 21 nt, synthetic construct
  modified_base 1: mod_base = OTHER; note = 2'-O-methyladenosine
  modified_base 1^2: mod_base = OTHER; note = phosphorothioate linkage
  modified_base 2: mod_base = cm
  modified_base 3: mod_base = gm
  modified_base 4: mod_base = um
  modified_base 5: mod_base = OTHER; note = 2'-O-methyladenosine
  modified_base 6: mod_base = cm
  modified_base 7: mod_base = gm
  modified_base 8: mod_base = um
  modified_base 9: mod_base = OTHER; note = 2'-fluorouridine
  modified_base 10: mod_base = cm
  modified_base 11: mod_base = OTHER; note = 2'-fluorouridine
  modified_base 12: mod_base = um
  modified_base 13: mod_base = OTHER; note = 2'-fluorouridine
  modified_base 14: mod_base = cm
  modified_base 15: mod_base = um
  modified_base 16: mod_base = OTHER; note = 2'-O-methyladenosine
  modified_base 17: mod_base = um
  modified_base 18: mod_base = cm
  modified_base 19: mod_base = OTHER; note = 2'-O-methyladenosine
  modified_base 20: mod_base = um
  modified_base 21: mod_base = OTHER; note = 2'-O-methyladenosine
  source 1..21: mol_type = other RNA
acgtacgttctttctatcata

SEQ ID NO: 1530 - RNA, 21 nt, synthetic construct
  modified_base 1: mod_base = OTHER; note = 2'-O-methyladenosine
  modified_base 1^2: mod_base = OTHER; note = phosphorothioate linkage
  modified_base 2: mod_base = cm
  modified_base 3: mod_base = gm
  modified_base 4: mod_base = um
  modified_base 5: mod_base = OTHER; note = 2'-O-methyladenosine
  modified_base 6: mod_base = cm
  modified_base 7: mod_base = gm
  modified_base 8: mod_base = um
  modified_base 9: mod_base = OTHER; note = 2'-fluorouridine
  modified_base 10: mod_base = cm
  modified_base 11: mod_base = OTHER; note = 2'-fluorouridine
  modified_base 12: mod_base = OTHER; note = 2'-fluorouridine
  modified_base 13: mod_base = um
  modified_base 14: mod_base = cm
  modified_base 15: mod_base = um
  modified_base 16: mod_base = OTHER; note = 2'-O-methyladenosine
  modified_base 17: mod_base = um
  modified_base 18: mod_base = cm
  modified_base 19: mod_base = OTHER; note = 2'-O-methyladenosine
  modified_base 20: mod_base = um
  modified_base 21: mod_base = OTHER; note = 2'-O-methyladenosine
  source 1..21: mol_type = other RNA
acgtacgttctttctatcata

SEQ ID NO: 1531 - RNA, 21 nt, synthetic construct
  modified_base 1: mod_base = gm
  modified_base 1^2: mod_base = OTHER; note = phosphorothioate linkage
  modified_base 2: mod_base = OTHER; note = 2'-O-methyladenosine
  modified_base 3: mod_base = um
  modified_base 4: mod_base = OTHER; note = 2'-O-methyladenosine
  modified_base 5: mod_base = cm
  modified_base 6: mod_base = OTHER; note = 2'-O-methyladenosine
  modified_base 7: mod_base = gm
  modified_base 8: mod_base = OTHER; note = 2'-O-methyladenosine
  modified_base 9: mod_base = OTHER; note = 2'-fluoroguanosine
  modified_base 10: mod_base = OTHER; note = 2'-fluoroadenosine
  modified_base 11: mod_base = OTHER; note = 2'-fluorouridine
  modified_base 12: mod_base = um
  modified_base 13: mod_base = cm
  modified_base 14: mod_base = gm
  modified_base 15: mod_base = cm
  modified_base 16: mod_base = um
  modified_base 17: mod_base = um
  modified_base 18: mod_base = OTHER; note = 2 -O-methylinosine
  modified_base 19: mod_base = gm
  modified_base 20: mod_base = OTHER; note = 2'-O-methyladenosine
  modified_base 21: mod_base = OTHER; note = 2'-O-methyladenosine
  source 1..21: mol_type = other RNA
gatacagagattcgcttngaa

SEQ ID NO: 1532 - RNA, 21 nt, synthetic construct
  modified_base 1: mod_base = OTHER; note = 2'-O-methyladenosine
  modified_base 1^2: mod_base = OTHER; note = phosphorothioate linkage
  modified_base 2: mod_base = gm
  modified_base 3: mod_base = cm
  modified_base 4: mod_base = um
  modified_base 5: mod_base = um
  modified_base 6: mod_base = um
  modified_base 7: mod_base = cm
  modified_base 8: mod_base = um
  modified_base 9: mod_base = OTHER; note = 2'-fluorocytidine
  modified_base 10: mod_base = OTHER; note = 2'-fluoroguanosine
  modified_base 11: mod_base = OTHER; note = 2'-fluorouridine
  modified_base 12: mod_base = um
  modified_base 13: mod_base = um
  modified_base 14: mod_base = cm
  modified_base 15: mod_base = OTHER; note = 2'-O-methyladenosine
  modified_base 16: mod_base = gm
  modified_base 17: mod_base = cm
  modified_base 18: mod_base = um
  modified_base 19: mod_base = um
  modified_base 20: mod_base = OTHER; note = 2'-O-methyladenosine
  modified_base 21: mod_base = um
  source 1..21: mol_type = other RNA
agctttctcgtttcagcttat

SEQ ID NO: 1533 - RNA, 21 nt, synthetic construct
  modified_base 1: mod_base = gm
  modified_base 1^2: mod_base = OTHER; note = phosphorothioate linkage
  modified_base 2: mod_base = cm
  modified_base 3: mod_base = um
  modified_base 4: mod_base = um
  modified_base 5: mod_base = gm
  modified_base 6: mod_base = OTHER; note = 2'-O-methyladenosine
  modified_base 7: mod_base = OTHER; note = 2'-O-methyladenosine
  modified_base 8: mod_base = um
  modified_base 9: mod_base = OTHER; note = 2'-fluoroguanosine
  modified_base 10: mod_base = OTHER; note = 2'-fluoroguanosine
  modified_base 11: mod_base = OTHER; note = 2'-fluoroadenosine
  modified_base 12: mod_base = OTHER; note = 2'-O-methyladenosine
  modified_base 13: mod_base = um
  modified_base 14: mod_base = gm
  modified_base 15: mod_base = gm
  modified_base 16: mod_base = um
  modified_base 17: mod_base = OTHER; note = 2'-O-methyladenosine
  modified_base 18: mod_base = OTHER; note = 2'-O-methyladenosine
  modified_base 19: mod_base = cm
  modified_base 20: mod_base = OTHER; note = 2'-O-methyladenosine
  modified_base 21: mod_base = OTHER; note = 2'-O-methyladenosine
  source 1..21: mol_type = other RNA
gcttgaatggaatggtaacaa

SEQ ID NO: 1534 - RNA, 21 nt, synthetic construct
  modified_base 1: mod_base = gm
  modified_base 1^2: mod_base = OTHER; note = phosphorothioate linkage
  modified_base 2: mod_base = cm
  modified_base 3: mod_base = gm
  modified_base 4: mod_base = OTHER; note = 2'-O-methyladenosine
  modified_base 5: mod_base = cm
  modified_base 6: mod_base = OTHER; note = 2'-O-methyladenosine
  modified_base 7: mod_base = gm
  modified_base 8: mod_base = OTHER; note = 2'-O-methyladenosine
  modified_base 9: mod_base = OTHER; note = 2'-fluoroguanosine
  modified_base 10: mod_base = OTHER; note = 2'-fluoroadenosine
  modified_base 11: mod_base = OTHER; note = 2'-fluoroadenosine
  modified_base 12: mod_base = um
  modified_base 13: mod_base = OTHER; note = 2'-O-methyladenosine
  modified_base 14: mod_base = gm
  modified_base 15: mod_base = um
  modified_base 16: mod_base = um
  modified_base 17: mod_base = um
  modified_base 18: mod_base = cm
  modified_base 19: mod_base = gm
  modified_base 20: mod_base = OTHER; note = 2'-O-methyladenosine
  modified_base 21: mod_base = OTHER; note = 2'-O-methyladenosine
  source 1..21: mol_type = other RNA
gcgacagagaatagtttcgaa

SEQ ID NO: 1535 - RNA, 21 nt, synthetic construct
  modified_base 1: mod_base = gm
  modified_base 1^2: mod_base = OTHER; note = phosphorothioate linkage
  modified_base 2: mod_base = OTHER; note = 2'-O-methyladenosine
  modified_base 3: mod_base = um
  modified_base 4: mod_base = gm
  modified_base 5: mod_base = OTHER; note = 2'-O-methyladenosine
  modified_base 6: mod_base = gm
  modified_base 7: mod_base = gm
  modified_base 8: mod_base = OTHER; note = 2'-O-methyladenosine
  modified_base 9: mod_base = OTHER; note = 2'-fluorouridine
  modified_base 10: mod_base = OTHER; note = 2'-fluoroguanosine
  modified_base 11: mod_base = OTHER; note = 2'-fluorouridine
  modified_base 12: mod_base = cm
  modified_base 13: mod_base = OTHER; note = 2'-O-methyladenosine
  modified_base 14: mod_base = OTHER; note = 2'-O-methyladenosine
  modified_base 15: mod_base = OTHER; note = 2'-O-methyladenosine
  modified_base 16: mod_base = OTHER; note = 2'-O-methyladenosine
  modified_base 17: mod_base = OTHER; note = 2'-O-methyladenosine
  modified_base 18: mod_base = um
  modified_base 19: mod_base = gm
  modified_base 20: mod_base = cm
  modified_base 21: mod_base = OTHER; note = 2'-O-methyladenosine
  source 1..21: mol_type = other RNA
gatgaggatgtcaaaaatgca

SEQ ID NO: 1536 - RNA, 21 nt, synthetic construct
  modified_base 1: mod_base = gm
  modified_base 1^2: mod_base = OTHER; note = phosphorothioate linkage
  modified_base 2: mod_base = OTHER; note = 2'-O-methyladenosine
  modified_base 3: mod_base = um
  modified_base 4: mod_base = gm
  modified_base 5: mod_base = OTHER; note = 2'-O-methyladenosine
  modified_base 6: mod_base = gm
  modified_base 7: mod_base = gm
  modified_base 8: mod_base = OTHER; note = 2'-O-methyladenosine
  modified_base 9: mod_base = OTHER; note = 2'-fluorouridine
  modified_base 10: mod_base = gm
  modified_base 11: mod_base = OTHER; note = 2'-fluorouridine
  modified_base 12: mod_base = cm
  modified_base 13: mod_base = OTHER; note = 2'-fluoroadenosine
  modified_base 14: mod_base = OTHER; note = 2'-O-methyladenosine
  modified_base 15: mod_base = OTHER; note = 2'-O-methyladenosine
  modified_base 16: mod_base = OTHER; note = 2'-O-methyladenosine
  modified_base 17: mod_base = OTHER; note = 2'-O-methyladenosine
  modified_base 18: mod_base = um
  modified_base 19: mod_base = gm
  modified_base 20: mod_base = cm
  modified_base 21: mod_base = OTHER; note = 2'-O-methyladenosine
  source 1..21: mol_type = other RNA
gatgaggatgtcaaaaatgca

SEQ ID NO: 1537 - RNA, 21 nt, synthetic construct
  modified_base 1: mod_base = gm
  modified_base 1^2: mod_base = OTHER; note = phosphorothioate linkage
  modified_base 2: mod_base = um
  modified_base 3: mod_base = gm
  modified_base 4: mod_base = OTHER; note = 2'-O-methyladenosine
  modified_base 5: mod_base = um
  modified_base 6: mod_base = gm
  modified_base 7: mod_base = cm
  modified_base 8: mod_base = cm
  modified_base 9: mod_base = OTHER; note = 2'-fluorocytidine
  modified_base 10: mod_base = OTHER; note = 2'-fluorocytidine
  modified_base 11: mod_base = OTHER; note = 2'-fluoroadenosine
  modified_base 12: mod_base = um
  modified_base 13: mod_base = um
  modified_base 14: mod_base = cm
  modified_base 15: mod_base = cm
  modified_base 16: mod_base = um
  modified_base 17: mod_base = um
  modified_base 18: mod_base = gm
  modified_base 19: mod_base = OTHER; note = 2'-O-methyladenosine
  modified_base 20: mod_base = um
  modified_base 21: mod_base = OTHER; note = 2'-O-methyladenosine
  source 1..21: mol_type = other RNA
gtgatgccccattccttgata

SEQ ID NO: 1538 - RNA, 21 nt, synthetic construct
  modified_base 1: mod_base = um
  modified_base 1^2: mod_base = OTHER; note = phosphorothioate linkage
  modified_base 2: mod_base = gm
  modified_base 3: mod_base = OTHER; note = 2'-O-methyladenosine
  modified_base 4: mod_base = um
  modified_base 5: mod_base = gm
  modified_base 6: mod_base = cm
  modified_base 7: mod_base = cm
  modified_base 8: mod_base = cm
  modified_base 9: mod_base = OTHER; note = 2'-fluorocytidine
  modified_base 10: mod_base = OTHER; note = 2'-fluoroadenosine
  modified_base 11: mod_base = OTHER; note = 2'-fluorouridine
  modified_base 12: mod_base = um
  modified_base 13: mod_base = cm
  modified_base 14: mod_base = cm
  modified_base 15: mod_base = um
  modified_base 16: mod_base = um
  modified_base 17: mod_base = gm
  modified_base 18: mod_base = OTHER; note = 2'-O-methyladenosine
  modified_base 19: mod_base = um
  modified_base 20: mod_base = cm
  modified_base 21: mod_base = OTHER; note = 2'-O-methyladenosine
  source 1..21: mol_type = other RNA
tgatgccccattccttgatca

SEQ ID NO: 1539 - RNA, 21 nt, synthetic construct
  modified_base 1: mod_base = gm
  modified_base 1^2: mod_base = OTHER; note = phosphorothioate linkage
  modified_base 2: mod_base = OTHER; note = 2'-O-methyladenosine
  modified_base 3: mod_base = um
  modified_base 4: mod_base = gm
  modified_base 5: mod_base = cm
  modified_base 6: mod_base = cm
  modified_base 7: mod_base = cm
  modified_base 8: mod_base = cm
  modified_base 9: mod_base = OTHER; note = 2'-fluoroadenosine
  modified_base 10: mod_base = OTHER; note = 2'-fluorouridine
  modified_base 11: mod_base = OTHER; note = 2'-fluorouridine
  modified_base 12: mod_base = cm
  modified_base 13: mod_base = cm
  modified_base 14: mod_base = um
  modified_base 15: mod_base = um
  modified_base 16: mod_base = OTHER; note = 2 -O-methylinosine
  modified_base 17: mod_base = OTHER; note = 2'-O-methyladenosine
  modified_base 18: mod_base = um
  modified_base 19: mod_base = cm
  modified_base 20: mod_base = gm
  modified_base 21: mod_base = OTHER; note = 2'-O-methyladenosine
  source 1..21: mol_type = other RNA
gatgccccattccttnatcga

SEQ ID NO: 1540 - RNA, 21 nt, synthetic construct
  modified_base 1: mod_base = cm
  modified_base 1^2: mod_base = OTHER; note = phosphorothioate linkage
  modified_base 2: mod_base = um
  modified_base 3: mod_base = cm
  modified_base 4: mod_base = OTHER; note = 2'-O-methyladenosine
  modified_base 5: mod_base = um
  modified_base 6: mod_base = cm
  modified_base 7: mod_base = gm
  modified_base 8: mod_base = gm
  modified_base 9: mod_base = OTHER; note = 2'-fluoroadenosine
  modified_base 10: mod_base = OTHER; note = 2'-fluoroguanosine
  modified_base 11: mod_base = OTHER; note = 2'-fluoroguanosine
  modified_base 12: mod_base = OTHER; note = 2'-O-methyladenosine
  modified_base 13: mod_base = cm
  modified_base 14: mod_base = um
  modified_base 15: mod_base = um
  modified_base 16: mod_base = gm
  modified_base 17: mod_base = OTHER; note = 2'-O-methyladenosine
  modified_base 18: mod_base = OTHER; note = 2'-O-methyladenosine
  modified_base 19: mod_base = um
  modified_base 20: mod_base = gm
  modified_base 21: mod_base = OTHER; note = 2'-O-methyladenosine
  source 1..21: mol_type = other RNA
ctcatcggaggacttgaatga

SEQ ID NO: 1541 - RNA, 21 nt, synthetic construct
  modified_base 1: mod_base = um
  modified_base 1^2: mod_base = OTHER; note = phosphorothioate linkage
  modified_base 2: mod_base = cm
  modified_base 3: mod_base = OTHER; note = 2'-O-methyladenosine
  modified_base 4: mod_base = um
  modified_base 5: mod_base = cm
  modified_base 6: mod_base = gm
  modified_base 7: mod_base = gm
  modified_base 8: mod_base = OTHER; note = 2'-O-methyladenosine
  modified_base 9: mod_base = OTHER; note = 2'-fluoroguanosine
  modified_base 10: mod_base = OTHER; note = 2'-fluoroguanosine
  modified_base 11: mod_base = OTHER; note = 2'-fluoroadenosine
  modified_base 12: mod_base = cm
  modified_base 13: mod_base = um
  modified_base 14: mod_base = um
  modified_base 15: mod_base = gm
  modified_base 16: mod_base = OTHER; note = 2'-O-methyladenosine
  modified_base 17: mod_base = OTHER; note = 2'-O-methyladenosine
  modified_base 18: mod_base = um
  modified_base 19: mod_base = OTHER; note = 2 -O-methylinosine
  modified_base 20: mod_base = gm
  modified_base 21: mod_base = OTHER; note = 2'-O-methyladenosine
  source 1..21: mol_type = other RNA
tcatcggaggacttgaatnga

SEQ ID NO: 1542 - RNA, 21 nt, synthetic construct
  modified_base 1: mod_base = cm
  modified_base 1^2: mod_base = OTHER; note = phosphorothioate linkage
  modified_base 2: mod_base = OTHER; note = 2'-O-methyladenosine
  modified_base 3: mod_base = um
  modified_base 4: mod_base = cm
  modified_base 5: mod_base = gm
  modified_base 6: mod_base = gm
  modified_base 7: mod_base = OTHER; note = 2'-O-methyladenosine
  modified_base 8: mod_base = gm
  modified_base 9: mod_base = OTHER; note = 2'-fluoroguanosine
  modified_base 10: mod_base = OTHER; note = 2'-fluoroadenosine
  modified_base 11: mod_base = OTHER; note = 2'-fluorocytidine
  modified_base 12: mod_base = um
  modified_base 13: mod_base = um
  modified_base 14: mod_base = gm
  modified_base 15: mod_base = OTHER; note = 2'-O-methyladenosine
  modified_base 16: mod_base = OTHER; note = 2'-O-methyladenosine
  modified_base 17: mod_base = um
  modified_base 18: mod_base = gm
  modified_base 19: mod_base = gm
  modified_base 20: mod_base = OTHER; note = 2'-O-methyladenosine
  modified_base 21: mod_base = OTHER; note = 2'-O-methyladenosine
  source 1..21: mol_type = other RNA
catcggaggacttgaatggaa

SEQ ID NO: 1543 - RNA, 21 nt, synthetic construct
  modified_base 1: mod_base = um
  modified_base 1^2: mod_base = OTHER; note = phosphorothioate linkage
  modified_base 2: mod_base = cm
  modified_base 3: mod_base = gm
  modified_base 4: mod_base = gm
  modified_base 5: mod_base = OTHER; note = 2'-O-methyladenosine
  modified_base 6: mod_base = gm
  modified_base 7: mod_base = gm
  modified_base 8: mod_base = OTHER; note = 2'-O-methyladenosine
  modified_base 9: mod_base = OTHER; note = 2'-fluorocytidine
  modified_base 10: mod_base = OTHER; note = 2'-fluorouridine
  modified_base 11: mod_base = OTHER; note = 2'-fluorouridine
  modified_base 12: mod_base = gm
  modified_base 13: mod_base = OTHER; note = 2'-O-methyladenosine
  modified_base 14: mod_base = OTHER; note = 2'-O-methyladenosine
  modified_base 15: mod_base = um
  modified_base 16: mod_base = gm
  modified_base 17: mod_base = gm
  modified_base 18: mod_base = OTHER; note = 2'-O-methyladenosine
  modified_base 19: mod_base = OTHER; note = 2'-O-methyladenosine
  modified_base 20: mod_base = um
  modified_base 21: mod_base = OTHER; note = 2'-O-methyladenosine
  source 1..21: mol_type = other RNA
tcggaggacttgaatggaata

SEQ ID NO: 1544 - RNA, 21 nt, synthetic construct
  modified_base 1: mod_base = cm
  modified_base 1^2: mod_base = OTHER; note = phosphorothioate linkage
  modified_base 2: mod_base = gm
  modified_base 3: mod_base = gm
  modified_base 4: mod_base = OTHER; note = 2'-O-methyladenosine
  modified_base 5: mod_base = gm
  modified_base 6: mod_base = gm
  modified_base 7: mod_base = OTHER; note = 2'-O-methyladenosine
  modified_base 8: mod_base = cm
  modified_base 9: mod_base = OTHER; note = 2'-fluorouridine
  modified_base 10: mod_base = OTHER; note = 2'-fluorouridine
  modified_base 11: mod_base = OTHER; note = 2'-fluoroguanosine
  modified_base 12: mod_base = OTHER; note = 2'-O-methyladenosine
  modified_base 13: mod_base = OTHER; note = 2'-O-methyladenosine
  modified_base 14: mod_base = um
  modified_base 15: mod_base = gm
  modified_base 16: mod_base = OTHER; note = 2 -O-methylinosine
  modified_base 17: mod_base = OTHER; note = 2'-O-methyladenosine
  modified_base 18: mod_base = OTHER; note = 2'-O-methyladenosine
  modified_base 19: mod_base = um
  modified_base 20: mod_base = gm
  modified_base 21: mod_base = OTHER; note = 2'-O-methyladenosine
  source 1..21: mol_type = other RNA
cggaggacttgaatgnaatga

SEQ ID NO: 1545 - RNA, 21 nt, synthetic construct
  modified_base 1: mod_base = OTHER; note = 2'-O-methyladenosine
  modified_base 1^2: mod_base = OTHER; note = phosphorothioate linkage
  modified_base 2: mod_base = cm
  modified_base 3: mod_base = um
  modified_base 4: mod_base = gm
  modified_base 5: mod_base = OTHER; note = 2'-O-methyladenosine
  modified_base 6: mod_base = OTHER; note = 2'-O-methyladenosine
  modified_base 7: mod_base = OTHER; note = 2'-O-methyladenosine
  modified_base 8: mod_base = gm
  modified_base 9: mod_base = OTHER; note = 2'-fluorocytidine
  modified_base 10: mod_base = OTHER; note = 2'-fluoroguanosine
  modified_base 11: mod_base = OTHER; note = 2'-fluoroadenosine
  modified_base 12: mod_base = OTHER; note = 2'-O-methyladenosine
  modified_base 13: mod_base = cm
  modified_base 14: mod_base = um
  modified_base 15: mod_base = um
  modified_base 16: mod_base = cm
  modified_base 17: mod_base = OTHER; note = 2'-O-methyladenosine
  modified_base 18: mod_base = OTHER; note = 2 -O-methylinosine
  modified_base 19: mod_base = um
  modified_base 20: mod_base = gm
  modified_base 21: mod_base = um
  source 1..21: mol_type = other RNA
actgaaagcgaacttcantgt

SEQ ID NO: 1546 - RNA, 21 nt, synthetic construct
  modified_base 1: mod_base = cm
  modified_base 1^2: mod_base = OTHER; note = phosphorothioate linkage
  modified_base 2: mod_base = um
  modified_base 3: mod_base = um
  modified_base 4: mod_base = cm
  modified_base 5: mod_base = um
  modified_base 6: mod_base = cm
  modified_base 7: mod_base = um
  modified_base 8: mod_base = um
  modified_base 9: mod_base = OTHER; note = 2'-fluorocytidine
  modified_base 10: mod_base = OTHER; note = 2'-fluorocytidine
  modified_base 11: mod_base = OTHER; note = 2'-fluoroadenosine
  modified_base 12: mod_base = gm
  modified_base 13: mod_base = gm
  modified_base 14: mod_base = OTHER; note = 2'-O-methyladenosine
  modified_base 15: mod_base = cm
  modified_base 16: mod_base = OTHER; note = 2'-O-methyladenosine
  modified_base 17: mod_base = um
  modified_base 18: mod_base = OTHER; note = 2'-O-methyladenosine
  modified_base 19: mod_base = cm
  modified_base 20: mod_base = um
  modified_base 21: mod_base = um
  source 1..21: mol_type = other RNA
cttctcttccaggacatactt

SEQ ID NO: 1547 - RNA, 21 nt, synthetic construct
  modified_base 1: mod_base = gm
  modified_base 1^2: mod_base = OTHER; note = phosphorothioate linkage
  modified_base 2: mod_base = OTHER; note = 2'-O-methyladenosine
  modified_base 3: mod_base = um
  modified_base 4: mod_base = gm
  modified_base 5: mod_base = um
  modified_base 6: mod_base = cm
  modified_base 7: mod_base = OTHER; note = 2'-O-methyladenosine
  modified_base 8: mod_base = OTHER; note = 2'-O-methyladenosine
  modified_base 9: mod_base = OTHER; note = 2'-fluoroadenosine
  modified_base 10: mod_base = OTHER; note = 2'-fluoroadenosine
  modified_base 11: mod_base = OTHER; note = 2'-fluoroadenosine
  modified_base 12: mod_base = um
  modified_base 13: mod_base = gm
  modified_base 14: mod_base = cm
  modified_base 15: mod_base = OTHER; note = 2'-O-methyladenosine
  modified_base 16: mod_base = OTHER; note = 2 -O-methylinosine
  modified_base 17: mod_base = um
  modified_base 18: mod_base = um
  modified_base 19: mod_base = gm
  modified_base 20: mod_base = gm
  modified_base 21: mod_base = OTHER; note = 2'-O-methyladenosine
  source 1..21: mol_type = other RNA
gatgtcaaaaatgcanttgga

SEQ ID NO: 1548 - RNA, 21 nt, synthetic construct
  modified_base 1: mod_base = gm
  modified_base 1^2: mod_base = OTHER; note = phosphorothioate linkage
  modified_base 2: mod_base = um
  modified_base 3: mod_base = gm
  modified_base 4: mod_base = OTHER; note = 2'-O-methyladenosine
  modified_base 5: mod_base = um
  modified_base 6: mod_base = gm
  modified_base 7: mod_base = OTHER; note = 2'-O-methyladenosine
  modified_base 8: mod_base = gm
  modified_base 9: mod_base = OTHER; note = 2'-fluoroadenosine
  modified_base 10: mod_base = OTHER; note = 2'-fluoroadenosine
  modified_base 11: mod_base = OTHER; note = 2'-fluorouridine
  modified_base 12: mod_base = gm
  modified_base 13: mod_base = gm
  modified_base 14: mod_base = gm
  modified_base 15: mod_base = OTHER; note = 2'-O-methyladenosine
  modified_base 16: mod_base = OTHER; note = 2 -O-methylinosine
  modified_base 17: mod_base = OTHER; note = 2'-O-methyladenosine
  modified_base 18: mod_base = cm
  modified_base 19: mod_base = cm
  modified_base 20: mod_base = um
  modified_base 21: mod_base = um
  source 1..21: mol_type = other RNA
gtgatgagaatggganacctt

SEQ ID NO: 1549 - RNA, 21 nt, synthetic construct
  modified_base 1: mod_base = gm
  modified_base 1^2: mod_base = OTHER; note = phosphorothioate linkage
  modified_base 2: mod_base = OTHER; note = 2'-O-methyladenosine
  modified_base 3: mod_base = um
  modified_base 4: mod_base = cm
  modified_base 5: mod_base = um
  modified_base 6: mod_base = um
  modified_base 7: mod_base = gm
  modified_base 8: mod_base = OTHER; note = 2'-O-methyladenosine
  modified_base 9: mod_base = OTHER; note = 2'-fluoroadenosine
  modified_base 10: mod_base = OTHER; note = 2'-fluoroadenosine
  modified_base 11: mod_base = OTHER; note = 2'-fluoroguanosine
  modified_base 12: mod_base = OTHER; note = 2'-O-methyladenosine
  modified_base 13: mod_base = gm
  modified_base 14: mod_base = gm
  modified_base 15: mod_base = OTHER; note = 2'-O-methyladenosine
  modified_base 16: mod_base = OTHER; note = 2'-O-methyladenosine
  modified_base 17: mod_base = um
  modified_base 18: mod_base = cm
  modified_base 19: mod_base = cm
  modified_base 20: mod_base = OTHER; note = 2'-O-methyladenosine
  modified_base 21: mod_base = OTHER; note = 2'-O-methyladenosine
  source 1..21: mol_type = other RNA
gatcttgaaagaggaatccaa

SEQ ID NO: 1550 - RNA, 21 nt, synthetic construct
  modified_base 1: mod_base = OTHER; note = 2'-O-methyladenosine
  modified_base 1^2: mod_base = OTHER; note = phosphorothioate linkage
  modified_base 2: mod_base = cm
  modified_base 3: mod_base = gm
  modified_base 4: mod_base = OTHER; note = 2'-O-methyladenosine
  modified_base 5: mod_base = gm
  modified_base 6: mod_base = OTHER; note = 2'-O-methyladenosine
  modified_base 7: mod_base = cm
  modified_base 8: mod_base = um
  modified_base 9: mod_base = OTHER; note = 2'-fluoroguanosine
  modified_base 10: mod_base = OTHER; note = 2'-fluoroguanosine
  modified_base 11: mod_base = OTHER; note = 2'-fluorouridine
  modified_base 12: mod_base = um
  modified_base 13: mod_base = cm
  modified_base 14: mod_base = OTHER; note = 2'-O-methyladenosine
  modified_base 15: mod_base = um
  modified_base 16: mod_base = OTHER; note = 2 -O-methylinosine
  modified_base 17: mod_base = cm
  modified_base 18: mod_base = um
  modified_base 19: mod_base = cm
  modified_base 20: mod_base = OTHER; note = 2'-O-methyladenosine
  modified_base 21: mod_base = um
  source 1..21: mol_type = other RNA
acgagactggttcatnctcat

SEQ ID NO: 1551 - RNA, 21 nt, synthetic construct
  modified_base 1: mod_base = gm
  modified_base 1^2: mod_base = OTHER; note = phosphorothioate linkage
  modified_base 2: mod_base = cm
  modified_base 3: mod_base = gm
  modified_base 4: mod_base = OTHER; note = 2'-O-methyladenosine
  modified_base 5: mod_base = OTHER; note = 2'-O-methyladenosine
  modified_base 6: mod_base = cm
  modified_base 7: mod_base = um
  modified_base 8: mod_base = um
  modified_base 9: mod_base = OTHER; note = 2'-fluorocytidine
  modified_base 10: mod_base = OTHER; note = 2'-fluoroadenosine
  modified_base 11: mod_base = OTHER; note = 2'-fluoroguanosine
  modified_base 12: mod_base = um
  modified_base 13: mod_base = gm
  modified_base 14: mod_base = um
  modified_base 15: mod_base = OTHER; note = 2'-O-methyladenosine
  modified_base 16: mod_base = OTHER; note = 2'-O-methyladenosine
  modified_base 17: mod_base = um
  modified_base 18: mod_base = cm
  modified_base 19: mod_base = um
  modified_base 20: mod_base = um
  modified_base 21: mod_base = um
  source 1..21: mol_type = other RNA
gcgaacttcagtgtaatcttt

SEQ ID NO: 1552 - RNA, 21 nt, synthetic construct
  modified_base 1: mod_base = OTHER; note = 2'-O-methyladenosine
  modified_base 1^2: mod_base = OTHER; note = phosphorothioate linkage
  modified_base 2: mod_base = cm
  modified_base 3: mod_base = cm
  modified_base 4: mod_base = gm
  modified_base 5: mod_base = OTHER; note = 2'-O-methyladenosine
  modified_base 6: mod_base = um
  modified_base 7: mod_base = um
  modified_base 8: mod_base = OTHER; note = 2'-O-methyladenosine
  modified_base 9: mod_base = OTHER; note = 2'-fluoroguanosine
  modified_base 10: mod_base = OTHER; note = 2'-fluoroadenosine
  modified_base 11: mod_base = OTHER; note = 2'-fluoroguanosine
  modified_base 12: mod_base = OTHER; note = 2'-O-methyladenosine
  modified_base 13: mod_base = cm
  modified_base 14: mod_base = cm
  modified_base 15: mod_base = um
  modified_base 16: mod_base = um
  modified_base 17: mod_base = gm
  modified_base 18: mod_base = OTHER; note = 2'-O-methyladenosine
  modified_base 19: mod_base = um
  modified_base 20: mod_base = OTHER; note = 2'-O-methyladenosine
  modified_base 21: mod_base = OTHER; note = 2'-O-methyladenosine
  source 1..21: mol_type = other RNA
accgattagagaccttgataa

SEQ ID NO: 1553 - RNA, 21 nt, synthetic construct
  modified_base 1: mod_base = gm
  modified_base 1^2: mod_base = OTHER; note = phosphorothioate linkage
  modified_base 2: mod_base = um
  modified_base 3: mod_base = OTHER; note = 2'-O-methyladenosine
  modified_base 4: mod_base = cm
  modified_base 5: mod_base = um
  modified_base 6: mod_base = OTHER; note = 2'-O-methyladenosine
  modified_base 7: mod_base = cm
  modified_base 8: mod_base = um
  modified_base 9: mod_base = OTHER; note = 2'-fluoroadenosine
  modified_base 10: mod_base = OTHER; note = 2'-fluoroadenosine
  modified_base 11: mod_base = OTHER; note = 2'-fluoroguanosine
  modified_base 12: mod_base = gm
  modified_base 13: mod_base = gm
  modified_base 14: mod_base = cm
  modified_base 15: mod_base = um
  modified_base 16: mod_base = um
  modified_base 17: mod_base = um
  modified_base 18: mod_base = cm
  modified_base 19: mod_base = OTHER; note = 2'-O-methyladenosine
  modified_base 20: mod_base = cm
  modified_base 21: mod_base = um
  source 1..21: mol_type = other RNA
gtactactaagggctttcact

SEQ ID NO: 1554 - RNA, 21 nt, synthetic construct
  modified_base 1: mod_base = gm
  modified_base 1^2: mod_base = OTHER; note = phosphorothioate linkage
  modified_base 2: mod_base = OTHER; note = 2'-O-methyladenosine
  modified_base 3: mod_base = OTHER; note = 2'-O-methyladenosine
  modified_base 4: mod_base = um
  modified_base 5: mod_base = gm
  modified_base 6: mod_base = gm
  modified_base 7: mod_base = um
  modified_base 8: mod_base = OTHER; note = 2'-O-methyladenosine
  modified_base 9: mod_base = OTHER; note = 2'-fluoroadenosine
  modified_base 10: mod_base = OTHER; note = 2'-fluorocytidine
  modified_base 11: mod_base = OTHER; note = 2'-fluoroadenosine
  modified_base 12: mod_base = cm
  modified_base 13: mod_base = gm
  modified_base 14: mod_base = gm
  modified_base 15: mod_base = um
  modified_base 16: mod_base = um
  modified_base 17: mod_base = cm
  modified_base 18: mod_base = OTHER; note = 2 -O-methylinosine
  modified_base 19: mod_base = OTHER; note = 2'-O-methyladenosine
  modified_base 20: mod_base = gm
  modified_base 21: mod_base = um
  source 1..21: mol_type = other RNA
gaatggtaacacggttcnagt

SEQ ID NO: 1555 - RNA, 21 nt, synthetic construct
  modified_base 1: mod_base = um
  modified_base 1^2: mod_base = OTHER; note = phosphorothioate linkage
  modified_base 2: mod_base = gm
  modified_base 3: mod_base = gm
  modified_base 4: mod_base = um
  modified_base 5: mod_base = OTHER; note = 2'-O-methyladenosine
  modified_base 6: mod_base = OTHER; note = 2'-O-methyladenosine
  modified_base 7: mod_base = cm
  modified_base 8: mod_base = OTHER; note = 2'-O-methyladenosine
  modified_base 9: mod_base = OTHER; note = 2'-fluorocytidine
  modified_base 10: mod_base = OTHER; note = 2'-fluoroguanosine
  modified_base 11: mod_base = OTHER; note = 2'-fluoroguanosine
  modified_base 12: mod_base = um
  modified_base 13: mod_base = um
  modified_base 14: mod_base = cm
  modified_base 15: mod_base = gm
  modified_base 16: mod_base = OTHER; note = 2'-O-methyladenosine
  modified_base 17: mod_base = OTHER; note = 2 -O-methylinosine
  modified_base 18: mod_base = um
  modified_base 19: mod_base = cm
  modified_base 20: mod_base = um
  modified_base 21: mod_base = OTHER; note = 2'-O-methyladenosine
  source 1..21: mol_type = other RNA
tggtaacacggttcgantcta

SEQ ID NO: 1556 - RNA, 21 nt, synthetic construct
  modified_base 1: mod_base = gm
  modified_base 1^2: mod_base = OTHER; note = phosphorothioate linkage
  modified_base 2: mod_base = um
  modified_base 3: mod_base = um
  modified_base 4: mod_base = OTHER; note = 2'-O-methyladenosine
  modified_base 5: mod_base = um
  modified_base 6: mod_base = gm
  modified_base 7: mod_base = cm
  modified_base 8: mod_base = OTHER; note = 2'-O-methyladenosine
  modified_base 9: mod_base = OTHER; note = 2'-fluoroadenosine
  modified_base 10: mod_base = OTHER; note = 2'-fluoroguanosine
  modified_base 11: mod_base = OTHER; note = 2'-fluorocytidine
  modified_base 12: mod_base = cm
  modified_base 13: mod_base = um
  modified_base 14: mod_base = um
  modified_base 15: mod_base = OTHER; note = 2'-O-methyladenosine
  modified_base 16: mod_base = cm
  modified_base 17: mod_base = OTHER; note = 2'-O-methyladenosine
  modified_base 18: mod_base = OTHER; note = 2'-O-methyladenosine
  modified_base 19: mod_base = cm
  modified_base 20: mod_base = um
  modified_base 21: mod_base = OTHER; note = 2'-O-methyladenosine
  source 1..21: mol_type = other RNA
gttatgcaagccttacaacta

SEQ ID NO: 1557 - RNA, 21 nt, synthetic construct
  modified_base 1: mod_base = gm
  modified_base 1^2: mod_base = OTHER; note = phosphorothioate linkage
  modified_base 2: mod_base = gm
  modified_base 3: mod_base = OTHER; note = 2'-O-methyladenosine
  modified_base 4: mod_base = gm
  modified_base 5: mod_base = OTHER; note = 2'-O-methyladenosine
  modified_base 6: mod_base = um
  modified_base 7: mod_base = OTHER; note = 2'-O-methyladenosine
  modified_base 8: mod_base = OTHER; note = 2'-O-methyladenosine
  modified_base 9: mod_base = OTHER; note = 2'-fluoroguanosine
  modified_base 10: mod_base = OTHER; note = 2'-fluoroadenosine
  modified_base 11: mod_base = OTHER; note = 2'-fluoroguanosine
  modified_base 12: mod_base = cm
  modified_base 13: mod_base = um
  modified_base 14: mod_base = um
  modified_base 15: mod_base = um
  modified_base 16: mod_base = cm
  modified_base 17: mod_base = um
  modified_base 18: mod_base = cm
  modified_base 19: mod_base = OTHER; note = 2 -O-methylinosine
  modified_base 20: mod_base = um
  modified_base 21: mod_base = um
  source 1..21: mol_type = other RNA
ggagataagagctttctcntt

SEQ ID NO: 1558 - RNA, 21 nt, synthetic construct
  modified_base 1: mod_base = um
  modified_base 1^2: mod_base = OTHER; note = phosphorothioate linkage
  modified_base 2: mod_base = cm
  modified_base 3: mod_base = OTHER; note = 2'-O-methyladenosine
  modified_base 4: mod_base = um
  modified_base 5: mod_base = gm
  modified_base 6: mod_base = cm
  modified_base 7: mod_base = cm
  modified_base 8: mod_base = um
  modified_base 9: mod_base = OTHER; note = 2'-fluorouridine
  modified_base 10: mod_base = OTHER; note = 2'-fluoroguanosine
  modified_base 11: mod_base = OTHER; note = 2'-fluoroadenosine
  modified_base 12: mod_base = OTHER; note = 2'-O-methyladenosine
  modified_base 13: mod_base = OTHER; note = 2'-O-methyladenosine
  modified_base 14: mod_base = cm
  modified_base 15: mod_base = OTHER; note = 2'-O-methyladenosine
  modified_base 16: mod_base = OTHER; note = 2'-O-methyladenosine
  modified_base 17: mod_base = um
  modified_base 18: mod_base = gm
  modified_base 19: mod_base = gm
  modified_base 20: mod_base = OTHER; note = 2'-O-methyladenosine
  modified_base 21: mod_base = OTHER; note = 2'-O-methyladenosine
  source 1..21: mol_type = other RNA
tcatgccttgaaacaatggaa

SEQ ID NO: 1559 - RNA, 21 nt, synthetic construct
  modified_base 1: mod_base = um
  modified_base 1^2: mod_base = OTHER; note = phosphorothioate linkage
  modified_base 2: mod_base = gm
  modified_base 3: mod_base = cm
  modified_base 4: mod_base = gm
  modified_base 5: mod_base = OTHER; note = 2'-O-methyladenosine
  modified_base 6: mod_base = OTHER; note = 2'-O-methyladenosine
  modified_base 7: mod_base = OTHER; note = 2'-O-methyladenosine
  modified_base 8: mod_base = OTHER; note = 2'-O-methyladenosine
  modified_base 9: mod_base = OTHER; note = 2'-fluoroguanosine
  modified_base 10: mod_base = OTHER; note = 2'-fluorocytidine
  modified_base 11: mod_base = OTHER; note = 2'-fluorouridine
  modified_base 12: mod_base = um
  modified_base 13: mod_base = gm
  modified_base 14: mod_base = OTHER; note = 2'-O-methyladenosine
  modified_base 15: mod_base = OTHER; note = 2'-O-methyladenosine
  modified_base 16: mod_base = cm
  modified_base 17: mod_base = OTHER; note = 2'-O-methyladenosine
  modified_base 18: mod_base = OTHER; note = 2 -O-methylinosine
  modified_base 19: mod_base = um
  modified_base 20: mod_base = cm
  modified_base 21: mod_base = um
  source 1..21: mol_type = other RNA
tgcgaaaagcttgaacantct

SEQ ID NO: 1560 - RNA, 21 nt, synthetic construct
  modified_base 1: mod_base = gm
  modified_base 1^2: mod_base = OTHER; note = phosphorothioate linkage
  modified_base 2: mod_base = um
  modified_base 3: mod_base = gm
  modified_base 4: mod_base = cm
  modified_base 5: mod_base = OTHER; note = 2'-O-methyladenosine
  modified_base 6: mod_base = gm
  modified_base 7: mod_base = OTHER; note = 2'-O-methyladenosine
  modified_base 8: mod_base = um
  modified_base 9: mod_base = OTHER; note = 2'-fluorouridine
  modified_base 10: mod_base = OTHER; note = 2'-fluoroadenosine
  modified_base 11: mod_base = OTHER; note = 2'-fluoroguanosine
  modified_base 12: mod_base = OTHER; note = 2'-O-methyladenosine
  modified_base 13: mod_base = gm
  modified_base 14: mod_base = gm
  modified_base 15: mod_base = um
  modified_base 16: mod_base = um
  modified_base 17: mod_base = um
  modified_base 18: mod_base = cm
  modified_base 19: mod_base = gm
  modified_base 20: mod_base = um
  modified_base 21: mod_base = OTHER; note = 2'-O-methyladenosine
  source 1..21: mol_type = other RNA
gtgcagattagaggtttcgta

SEQ ID NO: 1561 - RNA, 21 nt, synthetic construct
  modified_base 1: mod_base = OTHER; note = 2'-O-methyladenosine
  modified_base 1^2: mod_base = OTHER; note = phosphorothioate linkage
  modified_base 2: mod_base = gm
  modified_base 3: mod_base = OTHER; note = 2'-O-methyladenosine
  modified_base 4: mod_base = um
  modified_base 5: mod_base = cm
  modified_base 6: mod_base = um
  modified_base 7: mod_base = gm
  modified_base 8: mod_base = um
  modified_base 9: mod_base = OTHER; note = 2'-fluorouridine
  modified_base 10: mod_base = OTHER; note = 2'-fluorocytidine
  modified_base 11: mod_base = OTHER; note = 2'-fluorocytidine
  modified_base 12: mod_base = OTHER; note = 2'-O-methyladenosine
  modified_base 13: mod_base = cm
  modified_base 14: mod_base = cm
  modified_base 15: mod_base = OTHER; note = 2'-O-methyladenosine
  modified_base 16: mod_base = um
  modified_base 17: mod_base = um
  modified_base 18: mod_base = gm
  modified_base 19: mod_base = OTHER; note = 2'-O-methyladenosine
  modified_base 20: mod_base = OTHER; note = 2'-O-methyladenosine
  modified_base 21: mod_base = OTHER; note = 2'-O-methyladenosine
  source 1..21: mol_type = other RNA
agatctgttccaccattgaaa

SEQ ID NO: 1562 - RNA, 21 nt, synthetic construct
  modified_base 1: mod_base = gm
  modified_base 1^2: mod_base = OTHER; note = phosphorothioate linkage
  modified_base 2: mod_base = gm
  modified_base 3: mod_base = OTHER; note = 2'-O-methyladenosine
  modified_base 4: mod_base = gm
  modified_base 5: mod_base = OTHER; note = 2'-O-methyladenosine
  modified_base 6: mod_base = um
  modified_base 7: mod_base = cm
  modified_base 8: mod_base = OTHER; note = 2'-O-methyladenosine
  modified_base 9: mod_base = OTHER; note = 2'-fluorouridine
  modified_base 10: mod_base = OTHER; note = 2'-fluoroguanosine
  modified_base 11: mod_base = OTHER; note = 2'-fluoroadenosine
  modified_base 12: mod_base = OTHER; note = 2'-O-methyladenosine
  modified_base 13: mod_base = gm
  modified_base 14: mod_base = OTHER; note = 2'-O-methyladenosine
  modified_base 15: mod_base = um
  modified_base 16: mod_base = cm
  modified_base 17: mod_base = um
  modified_base 18: mod_base = gm
  modified_base 19: mod_base = um
  modified_base 20: mod_base = um
  modified_base 21: mod_base = OTHER; note = 2'-O-methyladenosine
  source 1..21: mol_type = other RNA
ggagatcatgaagatctgtta

SEQ ID NO: 1563 - RNA, 21 nt, synthetic construct
  modified_base 1: mod_base = gm
  modified_base 1^2: mod_base = OTHER; note = phosphorothioate linkage
  modified_base 2: mod_base = OTHER; note = 2'-O-methyladenosine
  modified_base 3: mod_base = OTHER; note = 2'-O-methyladenosine
  modified_base 4: mod_base = cm
  modified_base 5: mod_base = OTHER; note = 2'-O-methyladenosine
  modified_base 6: mod_base = gm
  modified_base 7: mod_base = OTHER; note = 2'-O-methyladenosine
  modified_base 8: mod_base = OTHER; note = 2'-O-methyladenosine
  modified_base 9: mod_base = OTHER; note = 2'-fluorocytidine
  modified_base 10: mod_base = OTHER; note = 2'-fluoroadenosine
  modified_base 11: mod_base = OTHER; note = 2'-fluorocytidine
  modified_base 12: mod_base = OTHER; note = 2'-O-methyladenosine
  modified_base 13: mod_base = cm
  modified_base 14: mod_base = cm
  modified_base 15: mod_base = OTHER; note = 2'-O-methyladenosine
  modified_base 16: mod_base = OTHER; note = 2'-O-methyladenosine
  modified_base 17: mod_base = um
  modified_base 18: mod_base = OTHER; note = 2'-O-methyladenosine
  modified_base 19: mod_base = cm
  modified_base 20: mod_base = um
  modified_base 21: mod_base = OTHER; note = 2'-O-methyladenosine
  source 1..21: mol_type = other RNA
gaacagaacacaccaatacta

SEQ ID NO: 1564 - RNA, 21 nt, synthetic construct
  modified_base 1: mod_base = um
  modified_base 1^2: mod_base = OTHER; note = phosphorothioate linkage
  modified_base 2: mod_base = gm
  modified_base 3: mod_base = gm
  modified_base 4: mod_base = cm
  modified_base 5: mod_base = um
  modified_base 6: mod_base = cm
  modified_base 7: mod_base = um
  modified_base 8: mod_base = um
  modified_base 9: mod_base = OTHER; note = 2'-fluorocytidine
  modified_base 10: mod_base = OTHER; note = 2'-fluoroadenosine
  modified_base 11: mod_base = OTHER; note = 2'-fluoroadenosine
  modified_base 12: mod_base = um
  modified_base 13: mod_base = um
  modified_base 14: mod_base = gm
  modified_base 15: mod_base = um
  modified_base 16: mod_base = um
  modified_base 17: mod_base = cm
  modified_base 18: mod_base = OTHER; note = 2'-O-methyladenosine
  modified_base 19: mod_base = um
  modified_base 20: mod_base = cm
  modified_base 21: mod_base = OTHER; note = 2'-O-methyladenosine
  source 1..21: mol_type = other RNA
tggctcttcaattgttcatca

SEQ ID NO: 1565 - RNA, 21 nt, synthetic construct
  modified_base 1: mod_base = gm
  modified_base 1^2: mod_base = OTHER; note = phosphorothioate linkage
  modified_base 2: mod_base = gm
  modified_base 3: mod_base = gm
  modified_base 4: mod_base = OTHER; note = 2'-O-methyladenosine
  modified_base 5: mod_base = cm
  modified_base 6: mod_base = um
  modified_base 7: mod_base = cm
  modified_base 8: mod_base = um
  modified_base 9: mod_base = OTHER; note = 2'-fluoroadenosine
  modified_base 10: mod_base = OTHER; note = 2'-fluoroguanosine
  modified_base 11: mod_base = OTHER; note = 2'-fluorocytidine
  modified_base 12: mod_base = OTHER; note = 2'-O-methyladenosine
  modified_base 13: mod_base = um
  modified_base 14: mod_base = OTHER; note = 2'-O-methyladenosine
  modified_base 15: mod_base = cm
  modified_base 16: mod_base = um
  modified_base 17: mod_base = um
  modified_base 18: mod_base = OTHER; note = 2'-O-methyladenosine
  modified_base 19: mod_base = cm
  modified_base 20: mod_base = um
  modified_base 21: mod_base = OTHER; note = 2'-O-methyladenosine
  source 1..21: mol_type = other RNA
gggactctagcatacttacta

SEQ ID NO: 1566 - RNA, 21 nt, synthetic construct
  modified_base 1: mod_base = gm
  modified_base 1^2: mod_base = OTHER; note = phosphorothioate linkage
  modified_base 2: mod_base = cm
  modified_base 3: mod_base = gm
  modified_base 4: mod_base = OTHER; note = 2'-O-methyladenosine
  modified_base 5: mod_base = gm
  modified_base 6: mod_base = OTHER; note = 2'-O-methyladenosine
  modified_base 7: mod_base = um
  modified_base 8: mod_base = OTHER; note = 2'-O-methyladenosine
  modified_base 9: mod_base = OTHER; note = 2'-fluorocytidine
  modified_base 10: mod_base = OTHER; note = 2'-fluorouridine
  modified_base 11: mod_base = OTHER; note = 2'-fluorocytidine
  modified_base 12: mod_base = OTHER; note = 2'-O-methyladenosine
  modified_base 13: mod_base = cm
  modified_base 14: mod_base = um
  modified_base 15: mod_base = OTHER; note = 2'-O-methyladenosine
  modified_base 16: mod_base = OTHER; note = 2'-O-methyladenosine
  modified_base 17: mod_base = OTHER; note = 2 -O-methylinosine
  modified_base 18: mod_base = OTHER; note = 2'-O-methyladenosine
  modified_base 19: mod_base = cm
  modified_base 20: mod_base = cm
  modified_base 21: mod_base = OTHER; note = 2'-O-methyladenosine
  source 1..21: mol_type = other RNA
gcgagatactcactaanacca

SEQ ID NO: 1567 - RNA, 21 nt, synthetic construct
  modified_base 1: mod_base = gm
  modified_base 1^2: mod_base = OTHER; note = phosphorothioate linkage
  modified_base 2: mod_base = gm
  modified_base 3: mod_base = um
  modified_base 4: mod_base = cm
  modified_base 5: mod_base = gm
  modified_base 6: mod_base = OTHER; note = 2'-O-methyladenosine
  modified_base 7: mod_base = OTHER; note = 2'-O-methyladenosine
  modified_base 8: mod_base = OTHER; note = 2'-O-methyladenosine
  modified_base 9: mod_base = OTHER; note = 2'-fluoroguanosine
  modified_base 10: mod_base = OTHER; note = 2'-fluoroguanosine
  modified_base 11: mod_base = OTHER; note = 2'-fluorouridine
  modified_base 12: mod_base = um
  modified_base 13: mod_base = gm
  modified_base 14: mod_base = OTHER; note = 2'-O-methyladenosine
  modified_base 15: mod_base = OTHER; note = 2'-O-methyladenosine
  modified_base 16: mod_base = OTHER; note = 2'-O-methyladenosine
  modified_base 17: mod_base = cm
  modified_base 18: mod_base = OTHER; note = 2'-O-methyladenosine
  modified_base 19: mod_base = um
  modified_base 20: mod_base = gm
  modified_base 21: mod_base = OTHER; note = 2'-O-methyladenosine
  source 1..21: mol_type = other RNA
ggtcgaaaggttgaaacatga

SEQ ID NO: 1568 - RNA, 21 nt, synthetic construct
  modified_base 1: mod_base = um
  modified_base 1^2: mod_base = OTHER; note = phosphorothioate linkage
  modified_base 2: mod_base = gm
  modified_base 3: mod_base = OTHER; note = 2'-O-methyladenosine
  modified_base 4: mod_base = um
  modified_base 5: mod_base = gm
  modified_base 6: mod_base = gm
  modified_base 7: mod_base = um
  modified_base 8: mod_base = gm
  modified_base 9: mod_base = OTHER; note = 2'-fluoroguanosine
  modified_base 10: mod_base = OTHER; note = 2'-fluorocytidine
  modified_base 11: mod_base = OTHER; note = 2'-fluoroguanosine
  modified_base 12: mod_base = um
  modified_base 13: mod_base = OTHER; note = 2'-O-methyladenosine
  modified_base 14: mod_base = cm
  modified_base 15: mod_base = OTHER; note = 2'-O-methyladenosine
  modified_base 16: mod_base = um
  modified_base 17: mod_base = gm
  modified_base 18: mod_base = cm
  modified_base 19: mod_base = um
  modified_base 20: mod_base = OTHER; note = 2'-O-methyladenosine
  modified_base 21: mod_base = OTHER; note = 2'-O-methyladenosine
  source 1..21: mol_type = other RNA
tgatggtggcgtacatgctaa

SEQ ID NO: 1569 - RNA, 21 nt, synthetic construct
  modified_base 1: mod_base = OTHER; note = 2'-O-methyladenosine
  modified_base 1^2: mod_base = OTHER; note = phosphorothioate linkage
  modified_base 2: mod_base = gm
  modified_base 3: mod_base = gm
  modified_base 4: mod_base = OTHER; note = 2'-O-methyladenosine
  modified_base 5: mod_base = cm
  modified_base 6: mod_base = OTHER; note = 2'-O-methyladenosine
  modified_base 7: mod_base = OTHER; note = 2'-O-methyladenosine
  modified_base 8: mod_base = gm
  modified_base 9: mod_base = OTHER; note = 2'-fluorocytidine
  modified_base 10: mod_base = OTHER; note = 2'-fluoroguanosine
  modified_base 11: mod_base = OTHER; note = 2'-fluoroguanosine
  modified_base 12: mod_base = OTHER; note = 2'-O-methyladenosine
  modified_base 13: mod_base = um
  modified_base 14: mod_base = cm
  modified_base 15: mod_base = OTHER; note = 2'-O-methyladenosine
  modified_base 16: mod_base = um
  modified_base 17: mod_base = cm
  modified_base 18: mod_base = OTHER; note = 2'-O-methyladenosine
  modified_base 19: mod_base = gm
  modified_base 20: mod_base = um
  modified_base 21: mod_base = OTHER; note = 2'-O-methyladenosine
  source 1..21: mol_type = other RNA
aggacaagcggatcatcagta

SEQ ID NO: 1570 - RNA, 21 nt, synthetic construct
  modified_base 1: mod_base = um
  modified_base 1^2: mod_base = OTHER; note = phosphorothioate linkage
  modified_base 2: mod_base = cm
  modified_base 3: mod_base = gm
  modified_base 4: mod_base = cm
  modified_base 5: mod_base = um
  modified_base 6: mod_base = gm
  modified_base 7: mod_base = cm
  modified_base 8: mod_base = um
  modified_base 9: mod_base = OTHER; note = 2'-fluoroadenosine
  modified_base 10: mod_base = OTHER; note = 2'-fluoroguanosine
  modified_base 11: mod_base = OTHER; note = 2'-fluoroadenosine
  modified_base 12: mod_base = OTHER; note = 2'-O-methyladenosine
  modified_base 13: mod_base = OTHER; note = 2'-O-methyladenosine
  modified_base 14: mod_base = cm
  modified_base 15: mod_base = OTHER; note = 2'-O-methyladenosine
  modified_base 16: mod_base = um
  modified_base 17: mod_base = OTHER; note = 2'-O-methyladenosine
  modified_base 18: mod_base = gm
  modified_base 19: mod_base = um
  modified_base 20: mod_base = OTHER; note = 2'-O-methyladenosine
  modified_base 21: mod_base = OTHER; note = 2'-O-methyladenosine
  source 1..21: mol_type = other RNA
tcgctgctagaaacatagtaa

SEQ ID NO: 1571 - RNA, 21 nt, synthetic construct
  modified_base 1: mod_base = um
  modified_base 1^2: mod_base = OTHER; note = phosphorothioate linkage
  modified_base 2: mod_base = cm
  modified_base 3: mod_base = cm
  modified_base 4: mod_base = OTHER; note = 2'-O-methyladenosine
  modified_base 5: mod_base = gm
  modified_base 6: mod_base = um
  modified_base 7: mod_base = OTHER; note = 2'-O-methyladenosine
  modified_base 8: mod_base = um
  modified_base 9: mod_base = OTHER; note = 2'-fluorouridine
  modified_base 10: mod_base = OTHER; note = 2'-fluorocytidine
  modified_base 11: mod_base = OTHER; note = 2'-fluoroadenosine
  modified_base 12: mod_base = OTHER; note = 2'-O-methyladenosine
  modified_base 13: mod_base = um
  modified_base 14: mod_base = um
  modified_base 15: mod_base = OTHER; note = 2'-O-methyladenosine
  modified_base 16: mod_base = cm
  modified_base 17: mod_base = OTHER; note = 2'-O-methyladenosine
  modified_base 18: mod_base = OTHER; note = 2'-O-methyladenosine
  modified_base 19: mod_base = cm
  modified_base 20: mod_base = OTHER; note = 2'-O-methyladenosine
  modified_base 21: mod_base = OTHER; note = 2'-O-methyladenosine
  source 1..21: mol_type = other RNA
tccagtattcaattacaacaa

SEQ ID NO: 1572 - RNA, 21 nt, synthetic construct
  modified_base 1: mod_base = gm
  modified_base 1^2: mod_base = OTHER; note = phosphorothioate linkage
  modified_base 2: mod_base = cm
  modified_base 3: mod_base = cm
  modified_base 4: mod_base = um
  modified_base 5: mod_base = um
  modified_base 6: mod_base = cm
  modified_base 7: mod_base = cm
  modified_base 8: mod_base = um
  modified_base 9: mod_base = OTHER; note = 2'-fluorouridine
  modified_base 10: mod_base = OTHER; note = 2'-fluorouridine
  modified_base 11: mod_base = OTHER; note = 2'-fluoroguanosine
  modified_base 12: mod_base = OTHER; note = 2'-O-methyladenosine
  modified_base 13: mod_base = cm
  modified_base 14: mod_base = OTHER; note = 2'-O-methyladenosine
  modified_base 15: mod_base = um
  modified_base 16: mod_base = gm
  modified_base 17: mod_base = OTHER; note = 2'-O-methyladenosine
  modified_base 18: mod_base = gm
  modified_base 19: mod_base = um
  modified_base 20: mod_base = OTHER; note = 2'-O-methyladenosine
  modified_base 21: mod_base = OTHER; note = 2'-O-methyladenosine
  source 1..21: mol_type = other RNA
gccttcctttgacatgagtaa

SEQ ID NO: 1573 - RNA, 21 nt, synthetic construct
  modified_base 1: mod_base = gm
  modified_base 1^2: mod_base = OTHER; note = phosphorothioate linkage
  modified_base 2: mod_base = cm
  modified_base 3: mod_base = um
  modified_base 4: mod_base = cm
  modified_base 5: mod_base = um
  modified_base 6: mod_base = OTHER; note = 2'-O-methyladenosine
  modified_base 7: mod_base = OTHER; note = 2'-O-methyladenosine
  modified_base 8: mod_base = um
  modified_base 9: mod_base = OTHER; note = 2'-fluoroguanosine
  modified_base 10: mod_base = OTHER; note = 2'-fluorocytidine
  modified_base 11: mod_base = OTHER; note = 2'-fluoroadenosine
  modified_base 12: mod_base = OTHER; note = 2'-O-methyladenosine
  modified_base 13: mod_base = gm
  modified_base 14: mod_base = gm
  modified_base 15: mod_base = um
  modified_base 16: mod_base = um
  modified_base 17: mod_base = cm
  modified_base 18: mod_base = OTHER; note = 2'-O-methyladenosine
  modified_base 19: mod_base = OTHER; note = 2'-O-methyladenosine
  modified_base 20: mod_base = cm
  modified_base 21: mod_base = OTHER; note = 2'-O-methyladenosine
  source 1..21: mol_type = other RNA
gctctaatgcaaggttcaaca

SEQ ID NO: 1574 - RNA, 21 nt, synthetic construct
  modified_base 1: mod_base = OTHER; note = 2'-O-methyladenosine
  modified_base 1^2: mod_base = OTHER; note = phosphorothioate linkage
  modified_base 2: mod_base = cm
  modified_base 3: mod_base = gm
  modified_base 4: mod_base = OTHER; note = 2'-O-methyladenosine
  modified_base 5: mod_base = cm
  modified_base 6: mod_base = um
  modified_base 7: mod_base = OTHER; note = 2'-O-methyladenosine
  modified_base 8: mod_base = OTHER; note = 2'-O-methyladenosine
  modified_base 9: mod_base = OTHER; note = 2'-fluorouridine
  modified_base 10: mod_base = OTHER; note = 2'-fluorocytidine
  modified_base 11: mod_base = OTHER; note = 2'-fluorocytidine
  modified_base 12: mod_base = OTHER; note = 2'-O-methyladenosine
  modified_base 13: mod_base = gm
  modified_base 14: mod_base = OTHER; note = 2'-O-methyladenosine
  modified_base 15: mod_base = OTHER; note = 2'-O-methyladenosine
  modified_base 16: mod_base = um
  modified_base 17: mod_base = OTHER; note = 2'-O-methyladenosine
  modified_base 18: mod_base = gm
  modified_base 19: mod_base = cm
  modified_base 20: mod_base = OTHER; note = 2'-O-methyladenosine
  modified_base 21: mod_base = um
  source 1..21: mol_type = other RNA
acgactaatccagaatagcat

SEQ ID NO: 1575 - RNA, 21 nt, synthetic construct
  modified_base 1: mod_base = gm
  modified_base 1^2: mod_base = OTHER; note = phosphorothioate linkage
  modified_base 2: mod_base = OTHER; note = 2'-O-methyladenosine
  modified_base 3: mod_base = um
  modified_base 4: mod_base = cm
  modified_base 5: mod_base = OTHER; note = 2'-O-methyladenosine
  modified_base 6: mod_base = gm
  modified_base 7: mod_base = OTHER; note = 2'-O-methyladenosine
  modified_base 8: mod_base = OTHER; note = 2'-O-methyladenosine
  modified_base 9: mod_base = OTHER; note = 2'-fluorouridine
  modified_base 10: mod_base = OTHER; note = 2'-fluoroguanosine
  modified_base 11: mod_base = OTHER; note = 2'-fluoroadenosine
  modified_base 12: mod_base = um
  modified_base 13: mod_base = cm
  modified_base 14: mod_base = OTHER; note = 2'-O-methyladenosine
  modified_base 15: mod_base = OTHER; note = 2'-O-methyladenosine
  modified_base 16: mod_base = OTHER; note = 2'-O-methyladenosine
  modified_base 17: mod_base = cm
  modified_base 18: mod_base = OTHER; note = 2 -O-methylinosine
  modified_base 19: mod_base = um
  modified_base 20: mod_base = gm
  modified_base 21: mod_base = OTHER; note = 2'-O-methyladenosine
  source 1..21: mol_type = other RNA
gatcagaatgatcaaacntga

SEQ ID NO: 1576 - RNA, 21 nt, synthetic construct
  modified_base 1: mod_base = cm
  modified_base 1^2: mod_base = OTHER; note = phosphorothioate linkage
  modified_base 2: mod_base = um
  modified_base 3: mod_base = gm
  modified_base 4: mod_base = um
  modified_base 5: mod_base = cm
  modified_base 6: mod_base = gm
  modified_base 7: mod_base = gm
  modified_base 8: mod_base = OTHER; note = 2'-O-methyladenosine
  modified_base 9: mod_base = OTHER; note = 2'-fluoroadenosine
  modified_base 10: mod_base = OTHER; note = 2'-fluoroguanosine
  modified_base 11: mod_base = OTHER; note = 2'-fluoroadenosine
  modified_base 12: mod_base = OTHER; note = 2'-O-methyladenosine
  modified_base 13: mod_base = um
  modified_base 14: mod_base = gm
  modified_base 15: mod_base = OTHER; note = 2'-O-methyladenosine
  modified_base 16: mod_base = um
  modified_base 17: mod_base = um
  modified_base 18: mod_base = gm
  modified_base 19: mod_base = gm
  modified_base 20: mod_base = um
  modified_base 21: mod_base = OTHER; note = 2'-O-methyladenosine
  source 1..21: mol_type = other RNA
ctgtcggaagaatgattggta

SEQ ID NO: 1577 - RNA, 21 nt, synthetic construct
  modified_base 1: mod_base = OTHER; note = 2'-O-methyladenosine
  modified_base 1^2: mod_base = OTHER; note = phosphorothioate linkage
  modified_base 2: mod_base = gm
  modified_base 3: mod_base = OTHER; note = 2'-O-methyladenosine
  modified_base 4: mod_base = gm
  modified_base 5: mod_base = OTHER; note = 2'-O-methyladenosine
  modified_base 6: mod_base = gm
  modified_base 7: mod_base = gm
  modified_base 8: mod_base = OTHER; note = 2'-O-methyladenosine
  modified_base 9: mod_base = OTHER; note = 2'-fluorouridine
  modified_base 10: mod_base = OTHER; note = 2'-fluoroguanosine
  modified_base 11: mod_base = OTHER; note = 2'-fluoroguanosine
  modified_base 12: mod_base = um
  modified_base 13: mod_base = gm
  modified_base 14: mod_base = cm
  modified_base 15: mod_base = um
  modified_base 16: mod_base = um
  modified_base 17: mod_base = um
  modified_base 18: mod_base = cm
  modified_base 19: mod_base = um
  modified_base 20: mod_base = gm
  modified_base 21: mod_base = OTHER; note = 2'-O-methyladenosine
  source 1..21: mol_type = other RNA
agagaggatggtgctttctga

SEQ ID NO: 1578 - RNA, 21 nt, synthetic construct
  modified_base 1: mod_base = cm
  modified_base 1^2: mod_base = OTHER; note = phosphorothioate linkage
  modified_base 2: mod_base = um
  modified_base 3: mod_base = gm
  modified_base 4: mod_base = OTHER; note = 2'-O-methyladenosine
  modified_base 5: mod_base = OTHER; note = 2'-O-methyladenosine
  modified_base 6: mod_base = um
  modified_base 7: mod_base = gm
  modified_base 8: mod_base = OTHER; note = 2'-O-methyladenosine
  modified_base 9: mod_base = OTHER; note = 2'-fluorouridine
  modified_base 10: mod_base = OTHER; note = 2'-fluoroguanosine
  modified_base 11: mod_base = OTHER; note = 2'-fluorocytidine
  modified_base 12: mod_base = cm
  modified_base 13: mod_base = OTHER; note = 2'-O-methyladenosine
  modified_base 14: mod_base = cm
  modified_base 15: mod_base = OTHER; note = 2'-O-methyladenosine
  modified_base 16: mod_base = um
  modified_base 17: mod_base = OTHER; note = 2'-O-methyladenosine
  modified_base 18: mod_base = um
  modified_base 19: mod_base = cm
  modified_base 20: mod_base = OTHER; note = 2'-O-methyladenosine
  modified_base 21: mod_base = OTHER; note = 2'-O-methyladenosine
  source 1..21: mol_type = other RNA
ctgaatgatgccacatatcaa

SEQ ID NO: 1579 - RNA, 21 nt, synthetic construct
  modified_base 1: mod_base = OTHER; note = 2'-O-methyladenosine
  modified_base 1^2: mod_base = OTHER; note = phosphorothioate linkage
  modified_base 2: mod_base = cm
  modified_base 3: mod_base = gm
  modified_base 4: mod_base = gm
  modified_base 5: mod_base = um
  modified_base 6: mod_base = cm
  modified_base 7: mod_base = OTHER; note = 2'-O-methyladenosine
  modified_base 8: mod_base = gm
  modified_base 9: mod_base = OTHER; note = 2'-fluorocytidine
  modified_base 10: mod_base = OTHER; note = 2'-fluoroadenosine
  modified_base 11: mod_base = OTHER; note = 2'-fluorocytidine
  modified_base 12: mod_base = um
  modified_base 13: mod_base = cm
  modified_base 14: mod_base = OTHER; note = 2'-O-methyladenosine
  modified_base 15: mod_base = um
  modified_base 16: mod_base = um
  modified_base 17: mod_base = cm
  modified_base 18: mod_base = um
  modified_base 19: mod_base = gm
  modified_base 20: mod_base = OTHER; note = 2'-O-methyladenosine
  modified_base 21: mod_base = OTHER; note = 2'-O-methyladenosine
  source 1..21: mol_type = other RNA
acggtcagcactcattctgaa

SEQ ID NO: 1580 - RNA, 21 nt, synthetic construct
  modified_base 1: mod_base = gm
  modified_base 1^2: mod_base = OTHER; note = phosphorothioate linkage
  modified_base 2: mod_base = cm
  modified_base 3: mod_base = um
  modified_base 4: mod_base = cm
  modified_base 5: mod_base = OTHER; note = 2'-O-methyladenosine
  modified_base 6: mod_base = cm
  modified_base 7: mod_base = OTHER; note = 2'-O-methyladenosine
  modified_base 8: mod_base = OTHER; note = 2'-O-methyladenosine
  modified_base 9: mod_base = OTHER; note = 2'-fluoroguanosine
  modified_base 10: mod_base = OTHER; note = 2'-fluoroadenosine
  modified_base 11: mod_base = OTHER; note = 2'-fluoroguanosine
  modified_base 12: mod_base = um
  modified_base 13: mod_base = cm
  modified_base 14: mod_base = OTHER; note = 2'-O-methyladenosine
  modified_base 15: mod_base = OTHER; note = 2'-O-methyladenosine
  modified_base 16: mod_base = um
  modified_base 17: mod_base = um
  modified_base 18: mod_base = gm
  modified_base 19: mod_base = gm
  modified_base 20: mod_base = um
  modified_base 21: mod_base = OTHER; note = 2'-O-methyladenosine
  source 1..21: mol_type = other RNA
gctcacaagagtcaattggta

SEQ ID NO: 1581 - RNA, 21 nt, synthetic construct
  modified_base 1: mod_base = gm
  modified_base 1^2: mod_base = OTHER; note = phosphorothioate linkage
  modified_base 2: mod_base = um
  modified_base 3: mod_base = OTHER; note = 2'-O-methyladenosine
  modified_base 4: mod_base = OTHER; note = 2'-O-methyladenosine
  modified_base 5: mod_base = um
  modified_base 6: mod_base = gm
  modified_base 7: mod_base = OTHER; note = 2'-O-methyladenosine
  modified_base 8: mod_base = OTHER; note = 2'-O-methyladenosine
  modified_base 9: mod_base = OTHER; note = 2'-fluoroguanosine
  modified_base 10: mod_base = OTHER; note = 2'-fluoroguanosine
  modified_base 11: mod_base = OTHER; note = 2'-fluoroguanosine
  modified_base 12: mod_base = um
  modified_base 13: mod_base = cm
  modified_base 14: mod_base = um
  modified_base 15: mod_base = um
  modified_base 16: mod_base = OTHER; note = 2'-O-methyladenosine
  modified_base 17: mod_base = um
  modified_base 18: mod_base = um
  modified_base 19: mod_base = um
  modified_base 20: mod_base = cm
  modified_base 21: mod_base = um
  source 1..21: mol_type = other RNA
gtaatgaagggtcttatttct

SEQ ID NO: 1582 - RNA, 21 nt, synthetic construct
  modified_base 1: mod_base = gm
  modified_base 1^2: mod_base = OTHER; note = phosphorothioate linkage
  modified_base 2: mod_base = OTHER; note = 2'-O-methyladenosine
  modified_base 3: mod_base = cm
  modified_base 4: mod_base = um
  modified_base 5: mod_base = um
  modified_base 6: mod_base = um
  modified_base 7: mod_base = gm
  modified_base 8: mod_base = um
  modified_base 9: mod_base = OTHER; note = 2'-fluoroguanosine
  modified_base 10: mod_base = OTHER; note = 2'-fluorocytidine
  modified_base 11: mod_base = OTHER; note = 2'-fluoroguanosine
  modified_base 12: mod_base = OTHER; note = 2'-O-methyladenosine
  modified_base 13: mod_base = cm
  modified_base 14: mod_base = OTHER; note = 2'-O-methyladenosine
  modified_base 15: mod_base = OTHER; note = 2'-O-methyladenosine
  modified_base 16: mod_base = um
  modified_base 17: mod_base = gm
  modified_base 18: mod_base = cm
  modified_base 19: mod_base = um
  modified_base 20: mod_base = um
  modified_base 21: mod_base = OTHER; note = 2'-O-methyladenosine
  source 1..21: mol_type = other RNA
gactttgtgcgacaatgctta

SEQ ID NO: 1583 - RNA, 21 nt, synthetic construct
  modified_base 1: mod_base = cm
  modified_base 1^2: mod_base = OTHER; note = phosphorothioate linkage
  modified_base 2: mod_base = cm
  modified_base 3: mod_base = OTHER; note = 2'-O-methyladenosine
  modified_base 4: mod_base = cm
  modified_base 5: mod_base = um
  modified_base 6: mod_base = OTHER; note = 2'-O-methyladenosine
  modified_base 7: mod_base = um
  modified_base 8: mod_base = OTHER; note = 2'-O-methyladenosine
  modified_base 9: mod_base = OTHER; note = 2'-fluorouridine
  modified_base 10: mod_base = OTHER; note = 2'-fluoroguanosine
  modified_base 11: mod_base = OTHER; note = 2'-fluoroadenosine
  modified_base 12: mod_base = um
  modified_base 13: mod_base = gm
  modified_base 14: mod_base = cm
  modified_base 15: mod_base = OTHER; note = 2'-O-methyladenosine
  modified_base 16: mod_base = OTHER; note = 2'-O-methyladenosine
  modified_base 17: mod_base = um
  modified_base 18: mod_base = cm
  modified_base 19: mod_base = OTHER; note = 2'-O-methyladenosine
  modified_base 20: mod_base = OTHER; note = 2'-O-methyladenosine
  modified_base 21: mod_base = OTHER; note = 2'-O-methyladenosine
  source 1..21: mol_type = other RNA
ccactatatgatgcaatcaaa

SEQ ID NO: 1584 - RNA, 21 nt, synthetic construct
  modified_base 1: mod_base = gm
  modified_base 1^2: mod_base = OTHER; note = phosphorothioate linkage
  modified_base 2: mod_base = OTHER; note = 2 -O-methyl-2-aminoadenosine
  modified_base 3: mod_base = OTHER; note = 2'-O-methyladenosine
  modified_base 4: mod_base = um
  modified_base 5: mod_base = cm
  modified_base 6: mod_base = OTHER; note = 2'-O-methyladenosine
  modified_base 7: mod_base = OTHER; note = 2'-O-methyladenosine
  modified_base 8: mod_base = OTHER; note = 2'-O-methyladenosine
  modified_base 9: mod_base = OTHER; note = 2'-fluoroadenosine
  modified_base 10: mod_base = OTHER; note = 2'-fluorocytidine
  modified_base 11: mod_base = OTHER; note = 2'-fluorouridine
  modified_base 12: mod_base = OTHER; note = 2'-O-methyladenosine
  modified_base 13: mod_base = gm
  modified_base 14: mod_base = gm
  modified_base 15: mod_base = cm
  modified_base 16: mod_base = um
  modified_base 17: mod_base = um
  modified_base 18: mod_base = um
  modified_base 19: mod_base = um
  modified_base 20: mod_base = cm
  modified_base 21: mod_base = OTHER; note = 2'-O-methyladenosine
  source 1..21: mol_type = other RNA
gaatcaaaactaggcttttca

SEQ ID NO: 1585 - RNA, 21 nt, synthetic construct
  modified_base 1: mod_base = um
  modified_base 1^2: mod_base = OTHER; note = phosphorothioate linkage
  modified_base 2: mod_base = gm
  modified_base 3: mod_base = cm
  modified_base 4: mod_base = OTHER; note = 2'-O-methyladenosine
  modified_base 5: mod_base = OTHER; note = 2'-O-methyladenosine
  modified_base 6: mod_base = OTHER; note = 2'-O-methyladenosine
  modified_base 7: mod_base = gm
  modified_base 8: mod_base = OTHER; note = 2'-O-methyladenosine
  modified_base 9: mod_base = OTHER; note = 2'-fluorouridine
  modified_base 10: mod_base = OTHER; note = 2'-fluoroguanosine
  modified_base 11: mod_base = OTHER; note = 2'-fluorouridine
  modified_base 12: mod_base = um
  modified_base 13: mod_base = gm
  modified_base 14: mod_base = gm
  modified_base 15: mod_base = OTHER; note = 2'-O-methyladenosine
  modified_base 16: mod_base = OTHER; note = 2 -O-methylinosine
  modified_base 17: mod_base = OTHER; note = 2'-O-methyladenosine
  modified_base 18: mod_base = cm
  modified_base 19: mod_base = cm
  modified_base 20: mod_base = um
  modified_base 21: mod_base = um
  source 1..21: mol_type = other RNA
tgcaaagatgttgganacctt

SEQ ID NO: 1586 - RNA, 21 nt, synthetic construct
  modified_base 1: mod_base = cm
  modified_base 1^2: mod_base = OTHER; note = phosphorothioate linkage
  modified_base 2: mod_base = gm
  modified_base 3: mod_base = OTHER; note = 2'-O-methyladenosine
  modified_base 4: mod_base = gm
  modified_base 5: mod_base = gm
  modified_base 6: mod_base = OTHER; note = 2'-O-methyladenosine
  modified_base 7: mod_base = gm
  modified_base 8: mod_base = um
  modified_base 9: mod_base = OTHER; note = 2'-fluoroguanosine
  modified_base 10: mod_base = OTHER; note = 2'-fluorocytidine
  modified_base 11: mod_base = OTHER; note = 2'-fluorocytidine
  modified_base 12: mod_base = um
  modified_base 13: mod_base = gm
  modified_base 14: mod_base = OTHER; note = 2'-O-methyladenosine
  modified_base 15: mod_base = um
  modified_base 16: mod_base = um
  modified_base 17: mod_base = OTHER; note = 2'-O-methyladenosine
  modified_base 18: mod_base = OTHER; note = 2'-O-methyladenosine
  modified_base 19: mod_base = um
  modified_base 20: mod_base = gm
  modified_base 21: mod_base = OTHER; note = 2'-O-methyladenosine
  source 1..21: mol_type = other RNA
cgaggagtgcctgattaatga

SEQ ID NO: 1587 - RNA, 21 nt, synthetic construct
  modified_base 1: mod_base = gm
  modified_base 1^2: mod_base = OTHER; note = phosphorothioate linkage
  modified_base 2: mod_base = gm
  modified_base 3: mod_base = um
  modified_base 4: mod_base = OTHER; note = 2'-O-methyladenosine
  modified_base 5: mod_base = um
  modified_base 6: mod_base = um
  modified_base 7: mod_base = cm
  modified_base 8: mod_base = gm
  modified_base 9: mod_base = OTHER; note = 2'-fluoroguanosine
  modified_base 10: mod_base = OTHER; note = 2'-fluoroadenosine
  modified_base 11: mod_base = OTHER; note = 2'-fluorouridine
  modified_base 12: mod_base = um
  modified_base 13: mod_base = um
  modified_base 14: mod_base = cm
  modified_base 15: mod_base = cm
  modified_base 16: mod_base = OTHER; note = 2'-O-methyladenosine
  modified_base 17: mod_base = um
  modified_base 18: mod_base = um
  modified_base 19: mod_base = um
  modified_base 20: mod_base = cm
  modified_base 21: mod_base = OTHER; note = 2'-O-methyladenosine
  source 1..21: mol_type = other RNA
ggtattcggatttccatttca

SEQ ID NO: 1588 - RNA, 21 nt, synthetic construct
  modified_base 1: mod_base = gm
  modified_base 1^2: mod_base = OTHER; note = phosphorothioate linkage
  modified_base 2: mod_base = cm
  modified_base 3: mod_base = cm
  modified_base 4: mod_base = um
  modified_base 5: mod_base = OTHER; note = 2'-O-methyladenosine
  modified_base 6: mod_base = um
  modified_base 7: mod_base = gm
  modified_base 8: mod_base = um
  modified_base 9: mod_base = OTHER; note = 2'-fluoroadenosine
  modified_base 10: mod_base = OTHER; note = 2'-fluoroguanosine
  modified_base 11: mod_base = OTHER; note = 2'-fluoroadenosine
  modified_base 12: mod_base = um
  modified_base 13: mod_base = gm
  modified_base 14: mod_base = gm
  modified_base 15: mod_base = OTHER; note = 2'-O-methyladenosine
  modified_base 16: mod_base = um
  modified_base 17: mod_base = um
  modified_base 18: mod_base = cm
  modified_base 19: mod_base = gm
  modified_base 20: mod_base = OTHER; note = 2'-O-methyladenosine
  modified_base 21: mod_base = OTHER; note = 2'-O-methyladenosine
  source 1..21: mol_type = other RNA
gcctatgtagatggattcgaa

SEQ ID NO: 1589 - RNA, 21 nt, synthetic construct
  modified_base 1: mod_base = OTHER; note = 2'-O-methyladenosine
  modified_base 1^2: mod_base = OTHER; note = phosphorothioate linkage
  modified_base 2: mod_base = um
  modified_base 3: mod_base = cm
  modified_base 4: mod_base = cm
  modified_base 5: mod_base = cm
  modified_base 6: mod_base = OTHER; note = 2'-O-methyladenosine
  modified_base 7: mod_base = OTHER; note = 2'-O-methyladenosine
  modified_base 8: mod_base = um
  modified_base 9: mod_base = OTHER; note = 2'-fluoroguanosine
  modified_base 10: mod_base = OTHER; note = 2 -O-methyl-2-aminoadenosine
  modified_base 11: mod_base = OTHER; note = 2'-fluorouridine
  modified_base 12: mod_base = OTHER; note = 2'-O-methyladenosine
  modified_base 13: mod_base = OTHER; note = 2'-O-methyladenosine
  modified_base 14: mod_base = gm
  modified_base 15: mod_base = cm
  modified_base 16: mod_base = OTHER; note = 2'-O-methyladenosine
  modified_base 17: mod_base = OTHER; note = 2'-O-methyladenosine
  modified_base 18: mod_base = OTHER; note = 2'-O-methyladenosine
  modified_base 19: mod_base = um
  modified_base 20: mod_base = gm
  modified_base 21: mod_base = um
  source 1..21: mol_type = other RNA
atcccaatgataagcaaatgt

SEQ ID NO: 1590 - RNA, 21 nt, synthetic construct
  source 1..21: mol_type = other RNA
ttacgtttcgacctcggttag

SEQ ID NO: 1591 - RNA, 21 nt, synthetic construct
  source 1..21: mol_type = other RNA
tatgatagaaagaacgtacgt

SEQ ID NO: 1592 - RNA, 21 nt, synthetic construct
  source 1..21: mol_type = other RNA
ttgacaagattggtcttgtct

SEQ ID NO: 1593 - RNA, 21 nt, synthetic construct
  source 1..21: mol_type = other RNA
agtcagaggtgacaagattgg

SEQ ID NO: 1594 - RNA, 21 nt, synthetic construct
  source 1..21: mol_type = other RNA
ttagtcagaggtgacaagatc

SEQ ID NO: 1595 - RNA, 21 nt, synthetic construct
  source 1..21: mol_type = other RNA
tctctatccatgttgttcggg

SEQ ID NO: 1596 - RNA, 21 nt, synthetic construct
  source 1..21: mol_type = other RNA
aactgctctatccatgttgtc

SEQ ID NO: 1597 - RNA, 21 nt, synthetic construct
  source 1..21: mol_type = other RNA
tagttgaatagcttagtgaca

SEQ ID NO: 1598 - RNA, 21 nt, synthetic construct
  source 1..21: mol_type = other RNA
ttggcaagtgcaccagttgac

SEQ ID NO: 1599 - RNA, 21 nt, synthetic construct
  source 1..21: mol_type = other RNA
aaagcagcttctgtggtcact

SEQ ID NO: 1600 - RNA, 21 nt, synthetic construct
  source 1..21: mol_type = other RNA
tcctgattagtggattggtgg

SEQ ID NO: 1601 - RNA, 21 nt, synthetic construct
  source 1..21: mol_type = other RNA
ttaggatgagtcccaatagtc

SEQ ID NO: 1602 - RNA, 21 nt, synthetic construct
  source 1..21: mol_type = other RNA
tacaaaatgaccatcgtcaac

SEQ ID NO: 1603 - RNA, 21 nt, synthetic construct
  source 1..21: mol_type = other RNA
tgacaaaatgaccatcgtcac

SEQ ID NO: 1604 - RNA, 21 nt, synthetic construct
  source 1..21: mol_type = other RNA
tatcaaggaatggggcatcac

SEQ ID NO: 1605 - RNA, 21 nt, synthetic construct
  source 1..21: mol_type = other RNA
tgatcaaggaatggggcatca

SEQ ID NO: 1606 - RNA, 21 nt, synthetic construct
  source 1..21: mol_type = other RNA
tcgatcaaggaatggggcatc

SEQ ID NO: 1607 - RNA, 21 nt, synthetic construct
  source 1..21: mol_type = other RNA
tgcatttttgacatcctcatc

SEQ ID NO: 1608 - RNA, 21 nt, synthetic construct
  source 1..21: mol_type = other RNA
tcattcaagtcctccgatgag

SEQ ID NO: 1609 - RNA, 21 nt, synthetic construct
  source 1..21: mol_type = other RNA
tccattcaagtcctccgatga

SEQ ID NO: 1610 - RNA, 21 nt, synthetic construct
  source 1..21: mol_type = other RNA
ttccattcaagtcctccgatg

SEQ ID NO: 1611 - RNA, 21 nt, synthetic construct
  source 1..21: mol_type = other RNA
tattccattcaagtcctccga

SEQ ID NO: 1612 - RNA, 21 nt, synthetic construct
  source 1..21: mol_type = other RNA
tcattccattcaagtcctccg

SEQ ID NO: 1613 - RNA, 21 nt, synthetic construct
  source 1..21: mol_type = other RNA
ttccaagcgaatctctgtatc

SEQ ID NO: 1614 - RNA, 21 nt, synthetic construct
  source 1..21: mol_type = other RNA
tcatgagcatgaaccagtctc

SEQ ID NO: 1615 - RNA, 21 nt, synthetic construct
  source 1..21: mol_type = other RNA
acactgaagttcgctttcagt

SEQ ID NO: 1616 - RNA, 21 nt, synthetic construct
  source 1..21: mol_type = other RNA
agtgaaagcccttagtagtac

SEQ ID NO: 1617 - RNA, 21 nt, synthetic construct
  source 1..21: mol_type = other RNA
tagtgaaagcccttagtagtc

SEQ ID NO: 1618 - RNA, 21 nt, synthetic construct
  source 1..21: mol_type = other RNA
aagtatgtcctggaagagaag

SEQ ID NO: 1619 - RNA, 21 nt, synthetic construct
  source 1..21: mol_type = other RNA
tccaactgcatttttgacatc

SEQ ID NO: 1620 - RNA, 21 nt, synthetic construct
  source 1..21: mol_type = other RNA
tatgaggaccccaactgcatc

SEQ ID NO: 1621 - RNA, 21 nt, synthetic construct
  source 1..21: mol_type = other RNA
ttgttaccattccattcaagc

SEQ ID NO: 1622 - RNA, 21 nt, synthetic construct
  source 1..21: mol_type = other RNA
tagactcgaaccgtgttacca

SEQ ID NO: 1623 - RNA, 21 nt, synthetic construct
  source 1..21: mol_type = other RNA
aaggtctcccattctcatcac

SEQ ID NO: 1624 - RNA, 21 nt, synthetic construct
  source 1..21: mol_type = other RNA
tagttgtaaggcttgcataac

SEQ ID NO: 1625 - RNA, 21 nt, synthetic construct
  source 1..21: mol_type = other RNA
ataagctgaaacgagaaagct

SEQ ID NO: 1626 - RNA, 21 nt, synthetic construct
  source 1..21: mol_type = other RNA
taacaagagtggctgtttcga

SEQ ID NO: 1627 - RNA, 21 nt, synthetic construct
  source 1..21: mol_type = other RNA
tcaagatccattccacgattc

SEQ ID NO: 1628 - RNA, 21 nt, synthetic construct
  source 1..21: mol_type = other RNA
ttggattcctctttcaagatc

SEQ ID NO: 1629 - RNA, 21 nt, synthetic construct
  source 1..21: mol_type = other RNA
aggtacagatgcaattgtcac

SEQ ID NO: 1630 - RNA, 21 nt, synthetic construct
  source 1..21: mol_type = other RNA
tcgaagtaggtacagatgcac

SEQ ID NO: 1631 - RNA, 21 nt, synthetic construct
  source 1..21: mol_type = other RNA
atgagcatgaaccagtctcgt

SEQ ID NO: 1632 - RNA, 21 nt, synthetic construct
  source 1..21: mol_type = other RNA
aaagattacactgaagttcgc

SEQ ID NO: 1633 - RNA, 21 nt, synthetic construct
  source 1..21: mol_type = other RNA
ttatcaaggtctctaatcggt

SEQ ID NO: 1634 - RNA, 21 nt, synthetic construct
  source 1..21: mol_type = other RNA
actcgaaccgtgttaccattc

SEQ ID NO: 1635 - RNA, 21 nt, synthetic construct
  source 1..21: mol_type = other RNA
tagtgaaggtctcccattctc

SEQ ID NO: 1636 - RNA, 21 nt, synthetic construct
  source 1..21: mol_type = other RNA
ttcgaaactattctctgtcgc

SEQ ID NO: 1637 - RNA, 21 nt, synthetic construct
  source 1..21: mol_type = other RNA
aacgagaaagctcttatctcc

SEQ ID NO: 1638 - RNA, 21 nt, synthetic construct
  source 1..21: mol_type = other RNA
ttccaagcgaatctctgtatg

SEQ ID NO: 1639 - RNA, 21 nt, synthetic construct
  source 1..21: mol_type = other RNA
ataagctgaaacgagaaagcc

SEQ ID NO: 1640 - RNA, 21 nt, synthetic construct
  source 1..21: mol_type = other RNA
tagtataagggaatgtggtgc

SEQ ID NO: 1641 - RNA, 21 nt, synthetic construct
  source 1..21: mol_type = other RNA
tagtattggtgtgttctgttc

SEQ ID NO: 1642 - RNA, 21 nt, synthetic construct
  source 1..21: mol_type = other RNA
ttccattgtttcaaggcatga

SEQ ID NO: 1643 - RNA, 21 nt, synthetic construct
  source 1..21: mol_type = other RNA
aagacttctatggtgttggcc

SEQ ID NO: 1644 - RNA, 21 nt, synthetic construct
  source 1..21: mol_type = other RNA
tggtcatgttgtctcttactc

SEQ ID NO: 1645 - RNA, 21 nt, synthetic construct
  source 1..21: mol_type = other RNA
tcaagcttttcgcaaatgctc

SEQ ID NO: 1646 - RNA, 21 nt, synthetic construct
  source 1..21: mol_type = other RNA
acttagtgttgtccccagtga

SEQ ID NO: 1647 - RNA, 21 nt, synthetic construct
  source 1..21: mol_type = other RNA
tcctagtcttgccattttgtc

SEQ ID NO: 1648 - RNA, 21 nt, synthetic construct
  source 1..21: mol_type = other RNA
ttagcatgttgaacatgccca

SEQ ID NO: 1649 - RNA, 21 nt, synthetic construct
  source 1..21: mol_type = other RNA
tgtagaatctgtccactcctg

SEQ ID NO: 1650 - RNA, 21 nt, synthetic construct
  source 1..21: mol_type = other RNA
tctaaaattagccacaaatcc

SEQ ID NO: 1651 - RNA, 21 nt, synthetic construct
  source 1..21: mol_type = other RNA
tgatgaacaattgaagagcca

SEQ ID NO: 1652 - RNA, 21 nt, synthetic construct
  source 1..21: mol_type = other RNA
ataagtttggtcctccatctg

SEQ ID NO: 1653 - RNA, 21 nt, synthetic construct
  source 1..21: mol_type = other RNA
tggtacatctgttcatcctca

SEQ ID NO: 1654 - RNA, 21 nt, synthetic construct
  source 1..21: mol_type = other RNA
tcaccatgctagaaattccac

SEQ ID NO: 1655 - RNA, 21 nt, synthetic construct
  source 1..21: mol_type = other RNA
tttcaatggtggaacagatct

SEQ ID NO: 1656 - RNA, 21 nt, synthetic construct
  source 1..21: mol_type = other RNA
tgaatgtggtgcttatggcat

SEQ ID NO: 1657 - RNA, 21 nt, synthetic construct
  source 1..21: mol_type = other RNA
tacgaaacctctaatctgcac

SEQ ID NO: 1658 - RNA, 21 nt, synthetic construct
  source 1..21: mol_type = other RNA
agactgttcaagcttttcgca

SEQ ID NO: 1659 - RNA, 21 nt, synthetic construct
  source 1..21: mol_type = other RNA
tcatcatcatcccaggactca

SEQ ID NO: 1660 - RNA, 21 nt, synthetic construct
  source 1..21: mol_type = other RNA
tcaagattcagtatcgagact

SEQ ID NO: 1661 - RNA, 21 nt, synthetic construct
  source 1..21: mol_type = other RNA
tcatgttgttctttatcactg

SEQ ID NO: 1662 - RNA, 21 nt, synthetic construct
  source 1..21: mol_type = other RNA
tagaactcttctttcttgatc

SEQ ID NO: 1663 - RNA, 21 nt, synthetic construct
  source 1..21: mol_type = other RNA
taacagatcttcatgatctcc

SEQ ID NO: 1664 - RNA, 21 nt, synthetic construct
  source 1..21: mol_type = other RNA
ttgagttcttcaatggtggac

SEQ ID NO: 1665 - RNA, 21 nt, synthetic construct
  source 1..21: mol_type = other RNA
tggtcttagtgagtatctcgc

SEQ ID NO: 1666 - RNA, 21 nt, synthetic construct
  source 1..21: mol_type = other RNA
tcatgtttcaacctttcgacc

SEQ ID NO: 1667 - RNA, 21 nt, synthetic construct
  source 1..21: mol_type = other RNA
ttagcatgtacgccaccatca

SEQ ID NO: 1668 - RNA, 21 nt, synthetic construct
  source 1..21: mol_type = other RNA
ttactatgtttctagcagcga

SEQ ID NO: 1669 - RNA, 21 nt, synthetic construct
  source 1..21: mol_type = other RNA
tactgatgatccgcttgtcct

SEQ ID NO: 1670 - RNA, 21 nt, synthetic construct
  source 1..21: mol_type = other RNA
tcttgatcatgcaatcctcct

SEQ ID NO: 1671 - RNA, 21 nt, synthetic construct
  source 1..21: mol_type = other RNA
tgtcaatactcactaccactc

SEQ ID NO: 1672 - RNA, 21 nt, synthetic construct
  source 1..21: mol_type = other RNA
agacaatagtacgttccctct

SEQ ID NO: 1673 - RNA, 21 nt, synthetic construct
  source 1..21: mol_type = other RNA
tcattgatctcccacatcatc

SEQ ID NO: 1674 - RNA, 21 nt, synthetic construct
  source 1..21: mol_type = other RNA
tggaacagtgtccttacgaac

SEQ ID NO: 1675 - RNA, 21 nt, synthetic construct
  source 1..21: mol_type = other RNA
ttgttgtaattgaatactgga

SEQ ID NO: 1676 - RNA, 21 nt, synthetic construct
  source 1..21: mol_type = other RNA
tagtaagtatgctagagtccc

SEQ ID NO: 1677 - RNA, 21 nt, synthetic construct
  source 1..21: mol_type = other RNA
taccaatcattcttccgacag

SEQ ID NO: 1678 - RNA, 21 nt, synthetic construct
  source 1..21: mol_type = other RNA
atgctattctggattagtcgt

SEQ ID NO: 1679 - RNA, 21 nt, synthetic construct
  source 1..21: mol_type = other RNA
tcagaaagcaccatcctctct

SEQ ID NO: 1680 - RNA, 21 nt, synthetic construct
  source 1..21: mol_type = other RNA
tccaaatcatgatatgagtac

SEQ ID NO: 1681 - RNA, 21 nt, synthetic construct
  source 1..21: mol_type = other RNA
ttgatatgtggcatcattcag

SEQ ID NO: 1682 - RNA, 21 nt, synthetic construct
  source 1..21: mol_type = other RNA
tgttgaaccttgcattagagc

SEQ ID NO: 1683 - RNA, 21 nt, synthetic construct
  source 1..21: mol_type = other RNA
tcacgtttgatcattctgatc

SEQ ID NO: 1684 - RNA, 21 nt, synthetic construct
  source 1..21: mol_type = other RNA
tcagaaatttcggtcattgac

SEQ ID NO: 1685 - RNA, 21 nt, synthetic construct
  source 1..21: mol_type = other RNA
tctttgaggatattgcacatc

SEQ ID NO: 1686 - RNA, 21 nt, synthetic construct
  source 1..21: mol_type = other RNA
ttcagaatgagtgctgaccgt

SEQ ID NO: 1687 - RNA, 21 nt, synthetic construct
  source 1..21: mol_type = other RNA
tgatttatgtgcaactgatcc

SEQ ID NO: 1688 - RNA, 21 nt, synthetic construct
  source 1..21: mol_type = other RNA
taccaattgactcttgtgagc

SEQ ID NO: 1689 - RNA, 21 nt, synthetic construct
  source 1..21: mol_type = other RNA
ttcttatgaaacttgatactc

SEQ ID NO: 1690 - RNA, 21 nt, synthetic construct
  source 1..21: mol_type = other RNA
tgagaatgtaggctgcacact

SEQ ID NO: 1691 - RNA, 21 nt, synthetic construct
  source 1..21: mol_type = other RNA
ttactcatgtcaaaggaaggc

SEQ ID NO: 1692 - RNA, 21 nt, synthetic construct
  source 1..21: mol_type = other RNA
agaaataagacccttcattac

SEQ ID NO: 1693 - RNA, 21 nt, synthetic construct
  source 1..21: mol_type = other RNA
taagcattgtcgcacaaagtc

SEQ ID NO: 1694 - RNA, 21 nt, synthetic construct
  source 1..21: mol_type = other RNA
tgaaatggaaatccgaatacc

SEQ ID NO: 1695 - RNA, 21 nt, synthetic construct
  source 1..21: mol_type = other RNA
tcatgattcggtctcttcctt

SEQ ID NO: 1696 - RNA, 21 nt, synthetic construct
  source 1..21: mol_type = other RNA
tgaaaagcctagttttgattc

SEQ ID NO: 1697 - RNA, 21 nt, synthetic construct
  source 1..21: mol_type = other RNA
tacgaaaggaatcccatagac

SEQ ID NO: 1698 - RNA, 21 nt, synthetic construct
  source 1..21: mol_type = other RNA
tttcaattgtctcttcgcctc

SEQ ID NO: 1699 - RNA, 21 nt, synthetic construct
  source 1..21: mol_type = other RNA
ttcgaatccatctacataggc

SEQ ID NO: 1700 - RNA, 21 nt, synthetic construct
  source 1..21: mol_type = other RNA
tgacatttgggaaagcttgcc

SEQ ID NO: 1701 - RNA, 21 nt, synthetic construct
  source 1..21: mol_type = other RNA
tttgattgcatcatatagtgg

SEQ ID NO: 1702 - RNA, 21 nt, synthetic construct
  source 1..21: mol_type = other RNA
aaggtctccaacatctttgca

SEQ ID NO: 1703 - RNA, 21 nt, synthetic construct
  source 1..21: mol_type = other RNA
tcatcaagttctatccagctt

SEQ ID NO: 1704 - RNA, 21 nt, synthetic construct
  source 1..21: mol_type = other RNA
acatttgcttatcattgggat

SEQ ID NO: 1705 - RNA, 21 nt, synthetic construct
  source 1..21: mol_type = other RNA
tcattaatcaggcactcctcg

SEQ ID NO: 1706 - RNA, 21 nt, synthetic construct
  source 1..21: mol_type = other RNA
ctaaccgaggtcgaaacgtaa

SEQ ID NO: 1707 - RNA, 21 nt, synthetic construct
  source 1..21: mol_type = other RNA
acgtacgttctttctatcata

SEQ ID NO: 1708 - RNA, 21 nt, synthetic construct
  source 1..21: mol_type = other RNA
gttgacgatggtcattttgta

SEQ ID NO: 1709 - RNA, 21 nt, synthetic construct
  source 1..21: mol_type = other RNA
gtgacgatggtcattttgtca

SEQ ID NO: 1710 - RNA, 21 nt, synthetic construct
  source 1..21: mol_type = other RNA
cccgaacaacatggatagaga

SEQ ID NO: 1711 - RNA, 21 nt, synthetic construct
  modified_base 16: mod_base = i
  source 1..21: mol_type = other RNA
gacaacatggatagancagtt

SEQ ID NO: 1712 - RNA, 21 nt, synthetic construct
  modified_base 18: mod_base = i
  source 1..21: mol_type = other RNA
gatacagagattcgcttngaa

SEQ ID NO: 1713 - RNA, 21 nt, synthetic construct
  source 1..21: mol_type = other RNA
agctttctcgtttcagcttat

SEQ ID NO: 1714 - RNA, 21 nt, synthetic construct
  source 1..21: mol_type = other RNA
gcttgaatggaatggtaacaa

SEQ ID NO: 1715 - RNA, 21 nt, synthetic construct
  source 1..21: mol_type = other RNA
gcgacagagaatagtttcgaa

SEQ ID NO: 1716 - RNA, 21 nt, synthetic construct
  source 1..21: mol_type = other RNA
gatgaggatgtcaaaaatgca

SEQ ID NO: 1717 - RNA, 21 nt, synthetic construct
  source 1..21: mol_type = other RNA
gtgatgccccattccttgata

SEQ ID NO: 1718 - RNA, 21 nt, synthetic construct
  source 1..21: mol_type = other RNA
tgatgccccattccttgatca

SEQ ID NO: 1719 - RNA, 21 nt, synthetic construct
  modified_base 16: mod_base = i
  source 1..21: mol_type = other RNA
gatgccccattccttnatcga

SEQ ID NO: 1720 - RNA, 21 nt, synthetic construct
  source 1..21: mol_type = other RNA
ctcatcggaggacttgaatga

SEQ ID NO: 1721 - RNA, 21 nt, synthetic construct
  modified_base 19: mod_base = i
  source 1..21: mol_type = other RNA
tcatcggaggacttgaatnga

SEQ ID NO: 1722 - RNA, 21 nt, synthetic construct
  source 1..21: mol_type = other RNA
catcggaggacttgaatggaa

SEQ ID NO: 1723 - RNA, 21 nt, synthetic construct
  source 1..21: mol_type = other RNA
tcggaggacttgaatggaata

SEQ ID NO: 1724 - RNA, 21 nt, synthetic construct
  modified_base 16: mod_base = i
  source 1..21: mol_type = other RNA
cggaggacttgaatgnaatga

SEQ ID NO: 1725 - RNA, 21 nt, synthetic construct
  modified_base 18: mod_base = i
  source 1..21: mol_type = other RNA
actgaaagcgaacttcantgt

SEQ ID NO: 1726 - RNA, 21 nt, synthetic construct
  source 1..21: mol_type = other RNA
cttctcttccaggacatactt

SEQ ID NO: 1727 - RNA, 21 nt, synthetic construct
  modified_base 16: mod_base = i
  source 1..21: mol_type = other RNA
gatgtcaaaaatgcanttgga

SEQ ID NO: 1728 - RNA, 21 nt, synthetic construct
  modified_base 16: mod_base = i
  source 1..21: mol_type = other RNA
gtgatgagaatggganacctt

SEQ ID NO: 1729 - RNA, 21 nt, synthetic construct
  source 1..21: mol_type = other RNA
gatcttgaaagaggaatccaa

SEQ ID NO: 1730 - RNA, 21 nt, synthetic construct
  modified_base 16: mod_base = i
  source 1..21: mol_type = other RNA
acgagactggttcatnctcat

SEQ ID NO: 1731 - RNA, 21 nt, synthetic construct
  source 1..21: mol_type = other RNA
gcgaacttcagtgtaatcttt

SEQ ID NO: 1732 - RNA, 21 nt, synthetic construct
  source 1..21: mol_type = other RNA
accgattagagaccttgataa

SEQ ID NO: 1733 - RNA, 21 nt, synthetic construct
  source 1..21: mol_type = other RNA
gtactactaagggctttcact

SEQ ID NO: 1734 - RNA, 21 nt, synthetic construct
  modified_base 18: mod_base = i
  source 1..21: mol_type = other RNA
gaatggtaacacggttcnagt

SEQ ID NO: 1735 - RNA, 21 nt, synthetic construct
  modified_base 17: mod_base = i
  source 1..21: mol_type = other RNA
tggtaacacggttcgantcta

SEQ ID NO: 1736 - RNA, 21 nt, synthetic construct
  source 1..21: mol_type = other RNA
gttatgcaagccttacaacta

SEQ ID NO: 1737 - RNA, 21 nt, synthetic construct
  modified_base 19: mod_base = i
  source 1..21: mol_type = other RNA
ggagataagagctttctcntt

SEQ ID NO: 1738 - RNA, 21 nt, synthetic construct
  source 1..21: mol_type = other RNA
tcatgccttgaaacaatggaa

SEQ ID NO: 1739 - RNA, 21 nt, synthetic construct
  modified_base 18: mod_base = i
  source 1..21: mol_type = other RNA
tgcgaaaagcttgaacantct

SEQ ID NO: 1740 - RNA, 21 nt, synthetic construct
  source 1..21: mol_type = other RNA
gtgcagattagaggtttcgta

SEQ ID NO: 1741 - RNA, 21 nt, synthetic construct
  source 1..21: mol_type = other RNA
agatctgttccaccattgaaa

SEQ ID NO: 1742 - RNA, 21 nt, synthetic construct
  source 1..21: mol_type = other RNA
ggagatcatgaagatctgtta

SEQ ID NO: 1743 - RNA, 21 nt, synthetic construct
  source 1..21: mol_type = other RNA
gaacagaacacaccaatacta

SEQ ID NO: 1744 - RNA, 21 nt, synthetic construct
  source 1..21: mol_type = other RNA
tggctcttcaattgttcatca

SEQ ID NO: 1745 - RNA, 21 nt, synthetic construct
  source 1..21: mol_type = other RNA
gggactctagcatacttacta

SEQ ID NO: 1746 - RNA, 21 nt, synthetic construct
  modified_base 17: mod_base = i
  source 1..21: mol_type = other RNA
gcgagatactcactaanacca

SEQ ID NO: 1747 - RNA, 21 nt, synthetic construct
  source 1..21: mol_type = other RNA
ggtcgaaaggttgaaacatga

SEQ ID NO: 1748 - RNA, 21 nt, synthetic construct
  source 1..21: mol_type = other RNA
tgatggtggcgtacatgctaa

SEQ ID NO: 1749 - RNA, 21 nt, synthetic construct
  source 1..21: mol_type = other RNA
aggacaagcggatcatcagta

SEQ ID NO: 1750 - RNA, 21 nt, synthetic construct
  source 1..21: mol_type = other RNA
tcgctgctagaaacatagtaa

SEQ ID NO: 1751 - RNA, 21 nt, synthetic construct
  source 1..21: mol_type = other RNA
tccagtattcaattacaacaa

SEQ ID NO: 1752 - RNA, 21 nt, synthetic construct
  source 1..21: mol_type = other RNA
gccttcctttgacatgagtaa

SEQ ID NO: 1753 - RNA, 21 nt, synthetic construct
  source 1..21: mol_type = other RNA
gctctaatgcaaggttcaaca

SEQ ID NO: 1754 - RNA, 21 nt, synthetic construct
  source 1..21: mol_type = other RNA
acgactaatccagaatagcat

SEQ ID NO: 1755 - RNA, 21 nt, synthetic construct
  modified_base 18: mod_base = i
  source 1..21: mol_type = other RNA
gatcagaatgatcaaacntga

SEQ ID NO: 1756 - RNA, 21 nt, synthetic construct
  source 1..21: mol_type = other RNA
ctgtcggaagaatgattggta

SEQ ID NO: 1757 - RNA, 21 nt, synthetic construct
  source 1..21: mol_type = other RNA
agagaggatggtgctttctga

SEQ ID NO: 1758 - RNA, 21 nt, synthetic construct
  source 1..21: mol_type = other RNA
ctgaatgatgccacatatcaa

SEQ ID NO: 1759 - RNA, 21 nt, synthetic construct
  source 1..21: mol_type = other RNA
acggtcagcactcattctgaa

SEQ ID NO: 1760 - RNA, 21 nt, synthetic construct
  source 1..21: mol_type = other RNA
gctcacaagagtcaattggta

SEQ ID NO: 1761 - RNA, 21 nt, synthetic construct
  source 1..21: mol_type = other RNA
gtaatgaagggtcttatttct

SEQ ID NO: 1762 - RNA, 21 nt, synthetic construct
  source 1..21: mol_type = other RNA
gactttgtgcgacaatgctta

SEQ ID NO: 1763 - RNA, 21 nt, synthetic construct
  source 1..21: mol_type = other RNA
ccactatatgatgcaatcaaa

SEQ ID NO: 1764 - RNA, 21 nt, synthetic construct
  source 1..21: mol_type = other RNA
gaatcaaaactaggcttttca

SEQ ID NO: 1765 - RNA, 21 nt, synthetic construct
  modified_base 16: mod_base = i
  source 1..21: mol_type = other RNA
tgcaaagatgttgganacctt

SEQ ID NO: 1766 - RNA, 21 nt, synthetic construct
  source 1..21: mol_type = other RNA
cgaggagtgcctgattaatga

SEQ ID NO: 1767 - RNA, 21 nt, synthetic construct
  source 1..21: mol_type = other RNA
ggtattcggatttccatttca

SEQ ID NO: 1768 - RNA, 21 nt, synthetic construct
  source 1..21: mol_type = other RNA
gcctatgtagatggattcgaa

SEQ ID NO: 1769 - RNA, 21 nt, synthetic construct
  source 1..21: mol_type = other RNA
atcccaatgataagcaaatgt

SEQ ID NO: 1770 - RNA, 21 nt, synthetic construct
  source 1..21: mol_type = other RNA
  modified_base 1: mod_base = OTHER; note = 2-aminoadenosine nucleotide
ncgtacgttctttctatcata

SEQ ID NO: 1771 - RNA, 21 nt, synthetic construct
  source 1..21: mol_type = other RNA
  modified_base 2: mod_base = OTHER; note = 2-aminoadenosine nucleotide
gnatcaaaactaggcttttca

SEQ ID NO: 1772 - RNA, 21 nt, synthetic construct
  source 1..21: mol_type = other RNA
  modified_base 10: mod_base = OTHER; note = 2-aminoadenosine nucleotide
atcccaatgntaagcaaatgt

1. An RNAi agent for inhibiting expression of an influenza A viral genome, comprising:
an antisense strand comprising at least 17 contiguous nucleotides differing by 0 or 1 nucleotides from any one of the sequences provided in Table 2A, 2B, 2C, 2D, 2E, 2F, 3A, 3B, 3C, 3D, 3E, or 3F; and
a sense strand comprising a nucleotide sequence that is at least partially complementary to the antisense strand.

2-5. (canceled)

6. The RNAi agent of claim 1, wherein at least one nucleotide of the RNAi agent is a modified nucleotide or includes a modified internucleoside linkage, wherein the at least one modified nucleotide of the RNAi agent is selected from the group consisting of: 2′-O-methyl nucleotide, 2′-fluoro nucleotide, 2′-deoxy nucleotide, 2′,3′-seco nucleotide mimic, locked nucleotide, 2′-F-arabino nucleotide, 2′-methoxyethyl nucleotide, abasic nucleotide, ribitol, inverted nucleotide, inverted 2′-O-methyl nucleotide, inverted 2′-deoxy nucleotide, 2′-amino-modified nucleotide, 2′-alkyl-modified nucleotide, morpholino nucleotide, vinyl phosphonate-containing nucleotide, cyclopropyl phosphonate-containing nucleotide, and 3′-O-methyl nucleotide.

7. (canceled)

8. The RNAi agent of claim 1, wherein the antisense strand comprises the nucleotide sequence of any one of the modified sequences provided in Table 3A, 3B, 3C, 3D, 3E, and 3F.

9. The RNAi agent of claim 1, wherein the sense strand comprises the nucleotide sequence of any one of the modified sequences provided in Table 4A, 4B, 4C, 4D, 4E, and 4F.

10. (canceled)

11. The RNAi agent of claim 1, wherein the sense strand is between 18 and 30 nucleotides in length, and the antisense strand is between 18 and 30 nucleotides in length.

12-16. (canceled)

17. The RNAi agent of claim 1, wherein the sense strand comprises one or two inverted abasic residues.

18. The RNAi agent of claim 1, wherein the RNAi agent comprises a sense strand and an antisense strand that form a duplex having the structure of any one of the duplexes in Table 7A-1, 7A-2, 7A-3, 7A-4, 7A-5, 7A-6, 7B-1, 7B-2, 7B-3, 7B-4, 7B-5, 7B-6, 8A, 8B, 8C, 8D, 8E, 8F, 9A, 9B, 9C, 9D, 9E, 9F, 10A, 10B, 10C, 10D, 10E, or 10F.

19. (canceled)

20. The RNAi agent of claim 1, comprising an antisense strand that consists of, consists essentially of, or comprises a nucleotide sequence that differs by 0 or 1 nucleotides from the following nucleotide sequence (5′→3′):
(SEQ ID NO: 1590)
UUACGUUUCGACCUCGGUUAG.

21. The RNAi agent of claim 20, wherein the sense strand consists of, consists essentially of, or comprises a nucleotide sequence that differs by 0 or 1 nucleotides from the following nucleotide sequence (5′→3′):
(SEQ ID NO: 1706)
CUAACCGAGGUCGAAACGUAA.

22. (canceled)

23. The RNAi agent of claim 1, comprising an antisense strand that comprises, consists of, or consists essentially of a modified nucleotide sequence that differs by 0 or 1 nucleotides from one of the following nucleotide sequences (5′→3′):
(SEQ ID NO: 1176)
cPrpusUfsascguUfucgaCfcUfcGfguuasg;
or
(SEQ ID NO: 1175)
cPrpusUfsascGfuuucgaCfcUfcGfguuasg;
wherein a represents 2′-O-methyl adenosine, c represents 2′-O-methyl cytidine, g represents 2′-O-methyl guanosine, and u represents 2′-O-methyl uridine; Af represents 2′-fluoro adenosine, Cf represents 2′-fluoro cytidine, Gf represents 2′-fluoro guanosine, and Uf represents 2′-fluoro uridine; cPrpu represents a 5′-cyclopropyl phosphonate-2′-O-methyl uridine; s represents a phosphorothioate linkage; and wherein all or substantially all of the nucleotides on the sense strand are modified nucleotides.

24. The RNAi agent of claim 1, wherein the sense strand comprises, consists of, or consists essentially of a modified nucleotide sequence that differs by 0 or 1 nucleotides from one of the following nucleotide sequences (5′→3′):
(SEQ ID NO: 1373)
csuaaccgaGfgUfcGfaaacguaa;
or
(SEQ ID NO: 1374)
csuaaccgaGfgUfcgaaacguaa;
wherein a represents 2′-O-methyl adenosine, c represents 2′-O-methyl cytidine, g represents 2′-O-methyl guanosine, and u represents 2′-O-methyl uridine; Af represents 2′-fluoro adenosine, Cf represents 2′-fluoro cytidine, Gf represents 2′-fluoro guanosine, and Uf represents 2′-fluoro uridine; cPrpu represents a 5′-cyclopropyl phosphonate-2′-O-methyl uridine; s represents a phosphorothioate linkage; and wherein all or substantially all of the nucleotides on the antisense strand are modified nucleotides.

25. (canceled)

26. The RNAi agent of claim 1, wherein the RNAi agent is linked to a targeting ligand.

27-29. (canceled)

30. The RNAi agent of claim 26, wherein the targeting ligand comprises the structure: [chemical structure]
or a pharmaceutically acceptable salt thereof, or [chemical structure]
or a pharmaceutically acceptable salt thereof,
wherein [symbol] indicates the point of connection to the RNAi agent.

31. The RNAi agent of claim 26, wherein the targeting ligand has a structure selected from the group consisting of: [chemical structure] [chemical structure] [chemical structure] [chemical structure] [chemical structure] [chemical structure] [chemical structure] [chemical structure] [chemical structure]
wherein [symbol] indicates the point of connection to the RNAi agent.

32-33. (canceled)

34. The RNAi agent of claim 26, wherein the targeting ligand is conjugated to the 5′ terminal end of the sense strand.

35. The RNAi agent of claim 1, wherein the influenza A viral genome is selected from the viral genomes of the group consisting of:
H1N1 viral genome;
H2N2 viral genome;
H3N2 viral genome;
H5N1 viral genome;
H7N9 viral genome; and
H10N8 viral genome.

36. A composition comprising the RNAi agent of claim 1, wherein the composition further comprises a pharmaceutically acceptable excipient.

37-39. (canceled)

40. The composition of claim 36, wherein the composition is formulated for administration by inhalation.

41. (canceled)

42. The composition of claim 36, wherein the RNAi agent is a sodium salt.

43-45. (canceled)

46. A method for inhibiting expression of an influenza A viral genome in a cell, the method comprising introducing into a cell an effective amount of an RNAi agent of claim 1.

47-65. (canceled)
